(19) United States
(12) Patent Application Publication
(10) Pub. No.: US 2023/0250134 A1
(43) Pub. Date: Aug. 10, 2023

(54) SARS-COV-2 inhibitors

(71) Applicants: University of Washington, Seattle, WA (US); NORTHWESTERN UNIVERSITY, Evanston, IL (US); WASHINGTON UNIVERSITY, St. Louis, MO (US)

(72) Inventors: Longxing CAO, Seattle, WA (US); Brian COVENTRY, Seattle, WA (US); Inna GORESHNIK, Seattle, WA (US); Lauren MILLER, Seattle, WA (US); David BAKER, Seattle, WA (US); Lisa KOZODOY, Seattle, WA (US); John BOWEN, Seattle, WA (US); Lauren CARTER, Seattle, WA (US); James Brett CASE, Seattle, WA (US); Michael DIAMOND, Seattle, WA (US); Natasha EDMAN, Seattle, WA (US); Andrew HUNT, Seattle, WA (US); Michael Christopher JEWETT, Seattle, WA (US); Cassandra Jean OGOHARA, Seattle, WA (US); Young-jun PARK, Seattle, WA (US); Rashmi RAVICHANDRAN, Seattle, WA (US); Lance Joseph STEWART, Seattle, WA (US); David VEESLER, Seattle, WA (US); Bastian VOGELI, Seattle, WA (US); Alexandra C. WALLS, Seattle, WA (US); Kejia WU, Seattle, WA (US); Scott BOYKEN, Seattle, WA (US); George UEDA, Seattle, WA (US)

(21) Appl. No.: 18/004,545

(22) PCT Filed: May 25, 2021
(86) PCT No.: PCT/US2021/034069

§ 371 Date: Jan. 6, 2023

Related U.S. Application Data
(60) Provisional application No. 63/067,593, filed on Aug. 19, 2020.
(60) Provisional application No. 63/051,474, filed on Jul. 14, 2020.

(51) Int. Cl. C07K 14/00; A61P 31/14; C12N 15/63

(52) U.S. Cl. CPC C07K 14/001; A61P 31/14; C12N 15/63

(57) ABSTRACT

Polypeptide inhibitors of SARS-COV-2 are disclosed comprising an amino acid sequence at least 50%, 55%, 60%, 65%, 70%, 75%, 80%, 85%, 90%, 91%, 92%, 93%, 94%, 95%, 96%, 97%, 98%, 99%, or 100% identical to the amino acid sequence selected from the group consisting of SEQ ID NOS: 1-17, 19-21, 23-34 and 100-101, and their use for treating and limiting development of SARS-COV-2 infection.

### CROSS REFERENCE

[0001] This application claims priority to U.S. Provisional Patent Application Serial Nos. 63/051,474 filed Jul. 14, 2020 and 63/067,593 filed Aug. 19, 2020, each incorporated by reference herein in its entirety.

### FEDERAL FUNDING STATEMENT

[0002] This invention was made with government support under Grant No. FA8750-17-C-0219, awarded by the Defense Advanced Research Projects Agency and Grant Nos. HHSN272201700059C and R01 GM120553, awarded by the National Institutes of Health. The government has certain rights in the invention.

### SEQUENCE LISTING STATEMENT

[0003] A computer readable form of the Sequence Listing is filed with this application by electronic submission and is incorporated into this application by reference in its entirety. The Sequence Listing is contained in the file created on May 25, 2021, having the file name “20-1074-WO_SeqList_ST25” and is 1,112 kb in size.

### BACKGROUND

[0004] SARS-COV-2 infection is thought to often start in the nose, with virus replicating there for several before spreading to the broader respiratory system. Delivery of a high concentration of a viral inhibitor into the nose and into the respiratory system generally could therefore potentially provide prophylactic protection, and therapeutic efficacy early in infection, and could be particularly useful for health care workers and others coming into frequent contact with infected individuals.

### SUMMARY

[0005] In a first aspect the disclosure provides polypeptides comprising an amino acid sequence at least 50%, 55%, 60%, 65%, 70%, 75%, 80%, 85%, 90%, 91%, 92%, 93%, 94%, 95%, 96%, 97%, 98%, 99%, or 100% identical to the amino acid sequence selected from the group consisting of SEQ ID NOS:1-17, 19-21, 23-34 and 100-101, wherein the polypeptide binds to SARS-COV-2 Spike glycoprotein receptor binding domain (RBD). In one embodiment, amino acid substitutions relative to the reference polypeptide amino acid sequence are selected from the exemplary amino acid substitutions provided in Table 1. In another embodiment, interface residues are identical to those in the reference polypeptide or are conservatively substituted relative to interface residues in the reference polypeptide. In a further embodiment the polypeptides comprise two or more copies of the amino acid sequence at least 50%, 55%, 60%, 65%, 70%, 75%, 80%, 85%, 90%, 91%, 92%, 93%, 94%, 95%, 96%, 97%, 98%, 99%, or 100% identical to the amino acid sequence selected from the group consisting of SEQ ID NOS: 1-17, 19-21, 23-34 and 100-101. In one embodiment, the polypeptide comprises the formula Z1-Z2-Z3, wherein:

[0006] Z1 comprises an amino acid sequence at least 50%, 55%, 60%, 65%, 70%, 75%, 80%, 85%, 90%, 91%, 92%, 93%, 94%, 95%, 96%, 97%, 98%, 99%, or 100% identical to the amino acid sequence selected from the group consisting of SEQ ID NOS: 1-17, 19-21, 23-34 and 100-164;

[0007] Z2 comprises an optional amino acid linker; and

[0008] Z3 comprises an amino acid sequence at least 50%, 55%, 60%, 65%, 70%, 75%, 80%, 85%, 90%, 91%, 92%, 93%, 94%, 95%, 96%, 97%, 98%, 99%, or 100% identical to the amino acid sequence selected from the group consisting of SEQ ID NOS: 1-17, 19-21, 23-34 and 100-164;

[0009] wherein Z1 and Z3 may be identical or different.

[0010] In another embodiment, the polypeptides comprises the formula B1-B2-Z1-Z2-Z3-B3-B4, wherein:

[0011] Z1, Z2, and Z3 are as defined;

[0012] B2 and B3 comprise optional amino acid linkers; and one or both of B1 and B4 independently comprise an amino acid sequence at least 50%, 55%, 60%, 65%, 70%, 75%, 80%, 85%, 90%, 91%, 92%, 93%, 94%, 95%, 96%, 97%, 98%, 99%, or 100% identical to the amino acid sequence selected from the group consisting of SEQ ID NOS: 1-17, 19-21, 23-34 and 100-164, wherein one of B1 and B4 may be absent.

[0013] In one embodiment, the polypeptides comprise an amino acid sequence at least 50%, 55%, 60%, 65%, 70%, 75%, 80%, 85%, 90%, 91%, 92%, 93%, 94%, 95%, 96%, 97%, 98%, 99%, or 100% identical to the amino acid sequence selected from the group consisting of SEQ ID NOS:47-60, 193-355 and 454-588, and a genus selected from those recited in the right hand column of Table 8 wherein genus positions X1, X2, X3, and X4 may be present or absent, and when present may be any sequence of 1 or more amino acids.

[0014] In another embodiment, the polypeptide comprises an amino acid sequence at least 50%, 55%, 60%, 65%, 70%, 75%, 80%, 85%, 90%, 91%, 92%, 93%, 94%, 95%, 96%, 97%, 98%, 99%, or 100% identical to the amino acid sequence selected from the group consisting of SEQ ID NOS: 356-453 and 595-692, and a genus selected from those recited in the middle column of Table 9 wherein genus positions X1, X2, X3, and X4 may be present or absent, and when present may be any sequence of 1 or more amino acids.

[0015] In a further embodiment, the polypeptide comprises an amino acid sequence at least 50%, 55%, 60%, 65%, 70%, 75%, 80%, 85%, 90%, 91%, 92%, 93%, 94%, 95%, 96%, 97%, 98%, 99%, or 100% identical to the amino acid sequence selected from the group consisting of SEQ ID NOS: 65-96, wherein in embodiments where a secretion signal is present (MARAWIFFLLCLAGRALA; SEQ ID NO:63) it can be replaced with any other secretion signal.

[0016] In other aspects, the disclosure provides nucleic acids encoding the polypeptide of the disclosure, expression vectors comprising the nucleic acids operatively linked to a promoter, host cell comprising a polypeptide, nucleic acid, and/or expression vector of the disclosure, oligomers of the polypeptides of the disclosure, compositions comprising 2, 3, 4, or more copies of the polypeptide any embodiment of the disclosure attached to a support, including but not limited to a polypeptide particle support, and pharmaceutical compositions, comprising a polypeptide, nucleic acid, expression vector, host cell, oligomer, and/or composition of the disclosure, and a pharmaceutically acceptable carrier.

[0017] In another aspect, the disclosure provides methods for treating or limiting development of a severe acute respiratory syndrome (SARS) coronavirus infection (including SARS-Co-V and SARS-COV-2), comprising administering to a subject in need thereof an amount of the polypeptide, the nucleic acid, the expression vector, the host cell, the oligomer, the composition, and/or the pharmaceutical composition of the disclosure, effective to treat or limit development of the infection.

### DESCRIPTION OF THE FIGURES

[0018] FIG. 1. Designed Minibinder Proteins For the SARS-CoV-2 Spike Receptor Binding Domain Designs for approach 1, and approach 2, were encoded in long oligonucleotides, and screened for binding to fluorescently tagged RBD on the yeast cell surface. Deep sequencing identified 3 Ace2 helix scaffolded designs (approach 1), and 150 de novo interface designs (approach 2) that were clearly enriched following FACS sorting for RBD binding. Designs were expressed in E. coli and purified, and many were found to have soluble expression, to bind RBD in biolayer interferometry experiments, and could effectively compete with ACE-2 for binding to RBD (example shown in FIG. 2). Based on BLI data (e.g. See FIG. 2) the RBD binding affinities of minbinders are: LCB1<1 nM, LCB3<1 nM. The affinities of LCB2, LCB4, LCB5, LCB6, LCB7,LCB8 range from 1˜20 nM, with relative strength of different binders being LCB4>LCB2>LCB9=LCB5>LCB6>LCB7.

[0019] FIG. 2. High Affinity Binding of De novo Designed Minibinder to SARS-COV-2 Spike RBD. Biotinylated Spike RBD protein was loaded to a streptavidin biolayer interferometry (BLI) tip (ForteBio Octet™) and after washing, the tip was dipped into purified Combo 1 anti-RBD minibinder at different concentrations. After loading the tips were placed into buffer alone. (Left and middle) Response curves indicate ˜Kd of 300 pM affinity. (Right) If ACE-2 is loaded to RBD tips and then Combo 1 is added, the minibinder rapidly displaces ACE-2 off of the BLI tip.

[0020] FIG. 3. De novo Designed Minibinder to SARS-COV-2 Spike RBD is Heat Stable. Purified Combo 1 minibinder was measured for in a circular dichroism spectrometer at 25 C, 95 C and at 25 C after heating to 95 C. The CD spectra were all very similar in shape indicating that the protein remains folded in all conditions.

[0021] FIG. 4. De novo Designed Minibinder to SARS-COV-2 Spike RBD are Potent in Virus Neutralization Assays. SARS-COV-2 strain 2019 n-COV/USA_WA1/2020 was obtained from the Centers for Disease Control and Prevention (gift of Natalie Thornburg). Virus stocks were produced in Vero CCL81 cells (ATCC) and titrated by focus-forming assay on Vero E6 cells. Serial dilutions of mAbs or minibinder were incubated with 102 focus-forming units (FFU) of SARS-COV-2 for 1 h at 37 C. RBD minibinder (or mAb)-virus complexes were added to Vero E6 cell monolayers in 96-well plates and incubated at 37C for 1 h. Subsequently, cells were overlaid with 1% (w/v) methylcellulose in MEM supplemented with 2% FBS. Plates were harvested 30 h later by removing overlays and fixed with 4% PFA in PBS for 20 min at room temperature. Plates were washed and sequentially incubated with 1 μg/mL of CR3022 ([1]) anti-S antibody and HRP-conjugated goat anti-human IgG in PBS supplemented with 0.1% saponin and 0.1% BSA. SARS-COV-2-infected cell foci were visualized using TrueBlue™ peroxidase substrate (KPL) and quantitated on an ImmunoSpot™ microanalyzer (Cellular Technologies). Data were processed using Prism software (GraphPad Prism™ M 8.0).

[0022] FIG. 5(A-J). LCB1-Fc prophylaxis protects against SARS-CoV-2 infection. (A) Molecular surface representation of three LCB1v1.3 miniproteins bound to individual protomers of the SARS-COV-2 spike protein trimer (left: side view; right: top view). (B) Binding curves of purified LCB1v1.3 and LCB1-Fc to SARS-COV-2 RBD as monitored by biolayer interferometry (one experiment performed in technical duplicate). (C) Neutralization curves of LCB1v1.3, LCB1-Fc, or control binder against a SARS-COV-2 WA1/2020 isolate (EC 50 values: 14.4 pM, 71.8 pM, and >10,000 nM respectively; average of two experiments, each performed in duplicate). (D-J) 7 to 8-week-old female and male K18-hACE2 transgenic mice received 250 μg of LCB1-Fc or control binder by i.p. injection one day prior to i.n. inoculation with 10³ PFU of SARS-COV-2. Tissues were collected at 4 and 7 dpi. (D) Weight change following LCB1-Fc administration (mean+SEM; n=8, two experiments: two-way ANOVA with Sidak's post-test: *** P<0.001, **** P<0.0001). (E) Infectious virus measured by plaque assay at 4 or 7 dpi in the lung (n=8, two experiments: Mann-Whitney test; *** P<0.001). (F-J) Viral RNA levels at 4 or 7 dpi in the lung, heart, spleen, brain, or nasal wash (n=8, two experiments: Mann-Whitney test: ns, not significant, * P<0.05, ** P<0.01, *** P<0.001, **** P<0.0001).

[0023] FIG. 6(A-C). LCB1-Fc prophylaxis prevents SARS-COV-2-mediated lung disease. (A) Respiratory mechanics parameters: inspiratory capacity, resistance, elastance tissue damping, quasi-static compliance, and pressure-volume loops measured at 7 dpi (n=3-6, two experiments: two-way ANOVA with Tukey's post-test: ns, not significant, * P<0.05, ** P<0.01, *** P<0.001 between indicated groups). (B) Hematoxylin and eosin staining of lung sections from mice treated at D-1 and collected at 7 dpi with SARS-COV-2. Images show low (left) and high (right; boxed region from left) magnification. Scale bars for all images, 100 μm. Representative images from n=3 mice per group. (C) Heat-map of cytokine mRNA levels from lung tissues of SARS-COV-2 infected mice at 4 dpi. For each cytokine, the fold-change was calculated relative to age-matched naïve control animals after normalization to Gapdh and the Log₂(fold change) was plotted (n=8 mice/group relative to n=3 naïve controls).

[0024] FIG. 7(A-J). Post-exposure delivery of anti-RBD binders reduces SARS-COV-2 burden. (A-G) 7 to 8-week-old female and male K18-hACE2 transgenic mice received 250 μg of LCB1-Fc or control binder by i.p. injection one day after i.n. inoculation with 103 PFU of SARS-COV-2. Tissues were collected at 4 or 7 dpi. (A) Weight change following LCB1-Fc administration (mean+SEM; n=6, two experiments: two-way ANOVA with Sidak's post-test: ** P<0.01, **** P<0.0001). (B) Infectious virus in the lung measured by plaque assay at 4 or 7 dpi in the lung (n=6, two experiments: ** P<0.01). (C-G) Viral RNA levels at 4 or 7 dpi in the lung, heart, spleen, brain, or nasal wash (n=6, two experiments: Mann-Whitney test: ns, not significant, * P<0.05, ** P<0.01). (H) Hematoxylin and eosin staining of lung sections from mice treated at D+1 and collected at 7 dpi with SARS-COV-2. Images show low (left) and high (right; boxed region from left) magnification. Scale bars for all images, 100 μm. Representative images from n=3 mice per group. (I-J) 7 to 8-week-old male K18-hACE2 transgenic mice received a single 50 μg i.n. dose of LCB1v1.3 or control binder at one- or two-days post-inoculation with 103 PFU of SARS-COV-2. Viral RNA levels at 7 dpi in the lung (I) or nasal wash (J) (n=6, two experiments: one-way ANOVA: ns, not significant, * P<0.05, **** P<0.0001).

[0025] FIG. 8(A-K). Intranasal administration of LCB1v1.3 reduces viral infection even when given 5 days prior to SARS-COV-2 exposure. (A-D) 7 to 8-week-old female K18-hACE2 transgenic mice received a single i.n. 50 μg dose of LCB1v1.3 or control binder at the indicated time prior to i.n. inoculation with 10³ PFU of SARS-COV-2. Tissues were collected at 4 or 7 dpi and viral RNA levels were determined (n=5-6 animals per group, two-experiments: two-way ANOVA with Sidak's post-test: ns, not significant, * P<0.05, ** P<0.01, *** P<0.001, **** P<0.0001). (E-J) 7 to 8-week-old female K18-hACE2 transgenic mice received the indicated i.n. dose of LCB 1v1.3 or control binder at one day prior to i.n. inoculation with 10³ PFU of SARS-COV-2. (E) Weight change following LCB1v1.3 or control binder administration (mean+SEM; n=6, two experiments: two-way ANOVA with Sidak's post-test compared to the control binder treated group: ** P<0.01,**** P<0.0001). (F-J) Viral RNA levels at 7 dpi in the lung, heart, spleen, brain, or nasal wash (n=6, two experiments: Kruskal-Wallis ANOVA with Dunn's post-test: * P<0.05. ** P<0.01, *** P<0.001). (K) Hematoxylin and eosin staining of lung sections from mice treated with a single i.n. 50 μg dose of LCB1v1.3 or control binder at D-1 and collected at 7 dpi with SARS-COV-2. Images show low (left) and high (right; boxed region from left) magnification. Scale bars for all images, 100 μm. Representative images from n=3 mice per group.

[0026] FIG. 9(A-H). Immunogenicity of LCB1v1.3 and protection from challenge. (A) Scheme of experimental details. K18-hACE2 transgenic mice (n=10 to 12 per group) were treated every 3 days with 50 μg of LCB1v1.3 or control binder by i.n. administration. On day 18 post-treatment, animals were bled and anti-LCB1v1.3 antibodies were measured. The following day, animals were challenged with 10³ PFU of SARS-COV-2, and tissues were collected at 7 dpi. (B) Binding of serum antibodies to LCB1v1.3 as measured by ELISA (three experiments). Dashed line indicated limit of detection of the assay. (C) Weight change following LCB1v1.3 or control binder administration (mean+SEM; two experiments: two-way ANOVA with Sidak's post-test: **** P<0.0001). (D-H) Viral RNA levels at 7 dpi in the lung, heart, spleen, brain, or nasal wash (two experiments: Mann-Whitney test: * P<0.05, ** P<0.01, **** P<0.0001).

[0027] FIG. 10(A-M). LCB1v1.3 protects mice against B.1.1.7 variant and WA1/2020 E484K/N501Y/D614G strains. (A) Neutralization of LCB1v1.3 against B.1.1.7 or WA1/2020 E484K/N501Y/D614G SARS-COV-2 (EC₅₀ values: 802 pM and 667 pM, respectively; mean of two experiments, each performed in duplicate). (B-G) 7 to 8-week-old female K18-hACE2 transgenic mice were treated with a single 50 μg i.n. dose of LCB1v1.3 or control binder at 1 day prior to i.n. inoculation with 10³ PFU of B.1.1.7. (B) Weight change following LCB1v1.3 or control binder administration (mean+SEM; n=6, two experiments: two-way ANOVA with Sidak's post-test: *** P<0.001, **** P<0.0001). (C-G) Viral RNA levels at 6 dpi in the lung, heart, spleen, nasal wash, or brain (n=6, two experiments: Mann-Whitney test: * P<0.05, ** P<0.01). (H-M) 8-week-old male K18-hACE2 transgenic mice were treated with a single 50 μg i.n. dose of LCB1v1.3 or control binder at 1 day prior to i.n. inoculation with 10³ PFU of WA1/2020 E484K/N501Y/D614G. (H) Weight change following LCB1v1.3 or control binder administration (mean+SEM; n=6, two experiments: two-way ANOVA with Sidak's post-test: * P<0.05, **** P<0.0001). (I-M) Viral RNA levels at 6 dpi in the lung, heart, spleen, nasal wash, or brain (n=6, two experiments: Mann-Whitney test: * P<0.05, ** P<0.01).

[0028] FIG. 11. Cytokine and chemokine induction following SARS-CoV-2 infection. Individual plots for cytokine and chemokine RNA levels in the lungs of SARS-COV-2 infected mice at 4 dpi following treatment with control or LCB1-Fc binders (n=8 per group, two experiments: Mann-Whitney test: ns, not significant, * P<0.05, ** P<0.01, *** P<0.001). Data were used to generate the heat-map in FIG. 6C.

[0029] FIG. 12(A-C). Intranasal delivery of LCB1v1.3 at 1 or 2 days post-SARS-CoV-2 infection reduces viral burden, Related to FIG. 7. (A-C) 7 to 8-week-old male K18-hACE2 transgenic mice received a single 50 μg i.n. dose of LCB1v1.3 or control binder at one- or two-days post-inoculation with 10³ PFU of SARS-COV-2. Viral RNA levels at 7 dpi in the heart (A), spleen (B), or brain (C) (n=6, two experiments: one-way ANOVA: * P<0.05, ** P<0.01).

[0030] FIG. 13. Intranasal prophylaxis of LCB1v1.3 reduces weight loss, Related to FIG. 8. 7 to 8-week-old female K18-hACE2 transgenic mice received a single 50 μg i.n. dose of LCB1v1.3 or control binder at the indicated time prior to i.n. inoculation with 10³ PFU of SARS-COV-2. Weight change was recorded daily (mean+SEM; n=6, two experiments: two-way ANOVA with Sidak's post-test:* P<0.05, ** P<0.01, *** P<0.001, **** P<0.0001).

[0031] FIG. 14(A-B). Multivalent minibinders simultaneously engage multiple epitopes on the pre-fusion SARS-COV-2 spike protein resulting in extremely slow dissociation rates. (A,B) Dissociation of the minibinder construct and the receptor binding domain (RBD) (A) or the hexapro spike protein (S6P) (B) complex was monitored via competition with 100-fold molar excess of untagged M1 using AlphaLISA™ (Mean+SEM, n=3).

[0032] FIG. 15(A-F). Cryo-EM structures of multivalent minibinders in complex with the SARS-COV-2 S glycoprotein. (A) Ribbon diagram representations of all three minibinders bound to the RBD. (B) Cryo-EM map of F31-G10 in complex with two RBDs. (C) Cryo-EM map of F231-P24 in complex with three RBDs. (D) Design model of H2-1 bound to the S glycoprotein. (E) Cryo-EM map of H2-1 in complex with the S glycoprotein in two orthogonal orientations. (F) Cryo-EM map showing the interacting residues of the H2-1 and S glycoprotein interface.

[0033] FIG. 16(A-F). Multivalency enhances both the breadth and potency of neutralization against SARS-COV-2 variants by minibinders. (A) Dissociation of minibinder constructs from S6P variants after 24 hours was measured via competition with untagged H2-0 using AlphaLISA (mean, n=3). Cells containing an X indicate insufficient signal in the no competitor condition to quantify the fraction of protein bound. (B) Competition of minibinder constructs with ACE2 for S6P was measured via ELISA (mean, n=2). (C) Neutralization curves of minibinder constructs against SARS-COV-2 pseudovirus variants (mean, n=2) (D)) Table summarizing neutralization potencies of multivalent minibinder constructs against SARS-COV-2 pseudovirus variants. N/A indicates an IC₅₀ value above the tested concentration range and an IC₅₀ greater than 50,000 pM. (E) Neutralization curves of minibinder constructs against authentic SARS-COV-2 isolates (mean, n=2). (F) Table summarizing neutralization potencies of multivalent minibinder constructs against authentic SARS-COV-2 isolates.

[0034] FIG. 17(A-C). Top multivalent minibinder candidates are escape resistant and protect mice from SARS-COV-2 infection via pre-exposure intranasal administration. (A) Plaque assays were performed to isolate VSV-SARS-COV-2 chimera virus escape mutants against a control neutralizing antibody (2B04) and the F231-P12 and H2-1 multivalent minibinders. Images are representative of 35 replicate wells per multivalent minibinder. Large plaques, highlighted by black arrows, are indicative of escape. (B, C) K18-hACE2-transgenic mice (n=6/timepoint) were dosed with 50 μg H2-0 by intranasal administration (i.n., 2×25 μl doses per nostril, 100 μl total) 24 h prior (T-24 h) to infection with 10³ plaque forming units of SARS-COV-2 Variants B.1.1.7, B1.351, B.1.1.24 intranasally at Day 0. (B) Daily weight change following infection (mean+SEM; n=6, two-way ANOVA with Sidak's post-test: * P<0.05, *** P<0.001, **** P<0.0001). (C) After days post infection (6 dpi) animals (n=6/timepoint) were sacrificed and analyzed for the presence of SARS-COV-2 viral RNA by quantitative real time RT-PCR in the lung, heart, spleen, brain, or nasal wash (n=6: Mann-Whitney test: ns, not significant, * P<0.05, ** P<0.01).

### DETAILED DESCRIPTION

[0035] All references cited are herein incorporated by reference in their entirety. Within this application, unless otherwise stated, the techniques utilized may be found in any of several well-known references such as: Molecular Cloning: A Laboratory Manual (Sambrook, et al., 1989, Cold Spring Harbor Laboratory Press), Gene Expression Technology (Methods in Enzymology, Vol. 185, edited by D. Goeddel, 1991. Academic Press, San Diego, Calif.), “Guide to Protein Purification” in Methods in Enzymology (M. P. Deutshcer, ed., (1990) Academic Press, Inc.); PCR Protocols: A Guide to Methods and Applications (Innis, et al. 1990. Academic Press, San Diego, Calif.), Culture of Animal Cells: A Manual of Basic Technique, 2nd Ed. (R. I. Freshney. 1987. Liss, Inc. New York, N.Y.), Gene Transfer and Expression Protocols, pp. 109-128, ed. E. J. Murray, The Humana Press Inc., Clifton, N.J.), and the Ambion 1998 Catalog (Ambion, Austin, Tex.).

[0036] As used herein, the singular forms “a”, “an” and “the” include plural referents unless the context clearly dictates otherwise.

[0037] As used herein, the amino acid residues are abbreviated as follows: alanine (Ala; A), asparagine (Asn; N), aspartic acid (Asp; D), arginine (Arg; R), cysteine (Cys; C), glutamic acid (Glu; E), glutamine (Gln; Q), glycine (Gly; G), histidine (His; H), isoleucine (Ile; I), leucine (Leu; L), lysine (Lys; K), methionine (Met; M), phenylalanine (Phe; F), proline (Pro; P), serine (Ser; S), threonine (Thr; T), tryptophan (Trp; W), tyrosine (Tyr; Y), and valine (Val; V).

[0038] In all embodiments of polypeptides disclosed herein, an N-terminal methionine residue is optional (i.e.: may be present or absent).

[0039] All embodiments of any aspect of the disclosure can be used in combination, unless the context clearly dictates otherwise.

[0040] Unless the context clearly requires otherwise, throughout the description and the claims, the words ‘comprise’, ‘comprising’, and the like are to be construed in an inclusive sense as opposed to an exclusive or exhaustive sense; that is to say, in the sense of “including, but not limited to”. Words using the singular or plural number also include the plural and singular number, respectively. Additionally, the words “herein,” “above,” and “below” and words of similar import, when used in this application, shall refer to this application as a whole and not to any particular portions of the application.

[0041] In a first aspect, the disclosure provides polypeptides comprising an amino acid sequence at least 50%, 55%, 60%, 65%, 70%, 75%, 80%, 85%, 90%, 91%, 92%, 93%, 94%, 95%, 96%, 97%, 98%, 99%, or 100% identical to the amino acid sequence selected from the group consisting of SEQ ID NOS: 1-17, 19-21, 23-34 and 100-101, wherein the polypeptide binds to SARS-COV-2 Spike glycoprotein receptor binding domain (RBD).

>LCB1-1
(SEQ ID NO: 1)
DKEWILQKIYEIMRLLDELGHAEASMRVSDLIYEF
MKKGDERLLEEAERLLEEVER
>LCB1-2
(SEQ ID NO: 2)
DKEEILNKIYEIMRLLDELGNAEASMRVSDLILEF
MKKGDERLLEEAERLLEEVER
>LCB1-3
(SEQ ID NO: 3)
DKEWILQKIYEIMRLLDELGHAEASMRVSDLIYEF
MKQGDERLLEEAERLLEEVER
>LCB1-4
(SEQ ID NO: 4)
DKENILQKIYEIMKTLDQLGHAEASMQVSDLIYEF
MKQGDERLLEEAERLLEEVER
>LCB1-5
(SEQ ID NO: 5)
DKENILQKIYEIMKTLDQLGHAEASMNVSDLIYEF
MKQGDERLLEEAERLLEEVER
(SEQ ID NO: 6)
LCB1_v1.1_Cys
DKENILQKIYEIMKTLDQLGHAEASMQVSDLIYEF
MKQGDERLLEEAERLLEEVERC
>LCB1_v1.2
(SEQ ID NO: 7)
DKENILQKIYEIMKTLDQLGHAEASMYVSDLIYEF
MKQGDERLLEEAERLLEEVER
>LCB1_v1.3
(SEQ ID NO: 8)
DKENILQKIYEIMKTLEQLGHAEASMQVSDLIYEF
MKQGDERLLEEAERLLEEVER
>LCB1_v1.4
(SEQ ID NO: 9)
DKENILQKIYEIMKTLEQLGHAEASMQVSDLIYEF
MKQGDENLLEEAEQLLQEVER
>LCB1_v1._5
(LCB1_v1._3 with N-link Glycosylation)
(SEQ ID NO: 10)
DKENILQKIYEIMKTLEQLGHAEASMNVSDLIYEF
MKQGDERLLEEAERLLEEVER
>LCB2-1
(SEQ ID NO: 11)
SDDEDSVRYLLYMAELRYEQGNPEKAKKILEMAEF
IAKRNNNEELERLVREVKKRL
>LCB2-2
(SEQ ID NO: 12)
SDDEDAVRYLLYMAELLYKQGNPEEAKKLLELAEF
IAKRNNNEELERLVREVKKRL
>LCB3-1
(SEQ ID NO: 13)
NDDELHMLMTDLVYEALHFAKDEEIKKRVFQLFEL
ADKAYKNNDRQKLEKVVEELKELLERLLS
>LCB3-2
(SEQ ID NO: 14)
NDDELLMLVTDLVAEALLFAKDEEIKKRVFTLFEL
ADKAYKNNDRDTLSKVVSELKELLERLQ
> LCB3_v1.2
(SEQ ID NO: 15)
NDDELHMQMTDLVYEALHFAKDEEIQKHVFQLFEK
ATKAYKNKDRQKLEKVVEELKELLERLLS
>LCB3-4
(SEQ ID NO: 16)
NDDELHMQMTDLVYEALHFAKDEEIQKHVFQLFEN
ATKAYKNKDRQKLEKVVEELKELLERLLS
>LCB3_v1.1
(SEQ ID NO: 17)
NDDELHMQMTDLVYEALHFAKDEEFQKHVFQLFEK
ATKAYKNNDRQKLEKVVEELKELLERLLS
>LCB3_v1.3
(SEQ ID NO: 19)
NDDELHMQMTDLVYEALHFAKDEEFQKHVFQLFEK
ATKAYKNKDRQKLEKVVEELKELLERLLS
>LCB3_v1.4
(SEQ ID NO: 20)
NDDELHMQMTDLVYEALHKAKDEEFQKHVFQLFEK
ATKARKNKDRQKLEKVVEELKELLERLLS
>LCB3_v1.5
(SEQ ID NO: 21)
NDDELHMQMTDLVYEALHKAKDEEMQKRVFQLFEQ
ADKAYKTKDRQKLEKVVEELKELLERLLS
>LCB4-1
(SEQ ID NO: 23)
QREKRLKOLEMLLEYAIERNDPYLMFDVAVEMLRL
AEENNDERIIERAKRILEEYE
>LCB4-2
(SEQ ID NO: 24)
DREERLKYLEMLLELAVERNDPYLIFDVAIELLRL
AEENNDERIYERAKRILEEVE
>LCB5-1
(SEQ ID NO: 25)
SLEELKEQVKELKKELSPEMRRLIEEALRFLEEGN
PAMAMMVLSDLVYQLGDPRVIDLYMLVTKT
>LCB5-2
(SEQ ID NO: 26)
SLEEVKEILKELKKELSPEDRRLIEEALRLLEEGN
PAMASMVLSDLVFLLGDPRVIELLMLVTKT
>LCB6-1
(SEQ ID NO: 27)
DREQRLVRFLVRLASKFNLSPEQILQLFEVLEELL
ERGVSEEEIRKOLEEVAKELG
>LCB6-2
(SEQ ID NO: 28)
DREQRLVRFLVRLASKFNLSMEQILILFDVLEELL
ERGVSEEEIRKILEEVAKEL
>LCB7-1
(SEQ ID NO: 29)
DDDIRYLIYMAKLRLEQGNPEEAEKVLEMARFLAE
RLGMEELLKEVRELLRKIEELR
>LCB7-2
(SEQ ID NO: 30)
DDDVRYLIYMAKLLLEQGNPEEAEKVLESARFAAE
LLGNEELLKEVRELLRKIEELR
>LCB8-1
(SEQ ID NO: 31)
PIIELLREAKEKNDEFAISDALYLVNELLQRTGDP
RLEEVLYLIWRALKEKDPRLLDRAIELFER
>LCB8-2
(SEQ ID NO: 32)
PVTELLREAKEKNDPMAISDALFLVFELAQRTGDP
RLEEVLFLIWRALKEKDPRLLDRAIELFER
>AHB1-1
(SEQ ID NO: 33)
DEDLEELERLYRKAEEVAKEAKDASRRGDDERAKE
QMERAMRLFDQVFELAQELQEKQTDGNRQKATHLD
KAVKEAADELYQRVR
>AHB1-2
(SEQ ID NO: 34)
AADELYQRVR
>AHB2-1
(SEQ ID NO: 100)
ELEERVMHLLDQVSELAHELLHKLTGEELQRATHF
DKWANEAILELIKSDDEREIREIEEEARRILEHLE
ELARK
>AHB2-2
(SEQ ID NO: 101)
ELEEQVMHVLDQVSELAHELLHKLTGEELERAAYF
NWWATEMMLELIKSDDEREIREIEEEARRILEHLE
ELARK

[0042] As detailed in the examples that follows, the polypeptides bind with high affinity to the SARS-COV-2 Spike glycoprotein receptor binding domain (RBD).

[0043] In all of embodiments herein, the percent identity requirement does not include any additional functional domain that may be incorporated in the polypeptide. In one embodiment, 1, 2, or 3 amino acids may be deleted from the N and/or C terminus.

[0044] The polypeptides have been subjected to extensive mutational analysis as described in the examples that follow, permitting determination of allowable substitutions at each residue within the polypeptide. Exemplary substitutions are as shown in Table 1 (The number denotes the residue number, and the letters denote the single letter amino acids that can be present at that residue). Thus, in one embodiment, amino acid substitutions relative to the reference polypeptide amino acid sequence (i.e.: one of SEQ ID NOS: 1-17, 19-21, 23-34 and 100-101) are selected from the exemplary amino acid substitutions provided in Table 1.

TABLE 1
Exemplary substitutions:

```
LCB1 (SEQ ID NOS: 1-10 and 102-136)
  1 -- A, C, D, E, F, G, H, I, K, L, M, N, P, Q, R, S, T, V, W, Y
  2 -- A, D, E, F, G, H, I, K, L, M, N, P, Q, R, S, T, V, W, Y
  3 -- A, D, E, F, G, H, K, L, M, N, P, Q, R, S, T, V, W, Y
  4 -- A, C, D, E, F, G, H, I, K, L, M, N, P, Q, R, S, T, V, W, Y
  5 -- A, C, D, E, F, G, H, I, K, L, M, N, P, Q, R, S, T, V, W, Y
  6 -- A, C, I, L, M, Q, T, V
  7 -- A, C, D, E, F, G, H, M, N, P, Q, R, S, V, W, Y
  8 -- A, C, D, E, F, G, H, I, K, L, M, N, Q, R, S, T, V, W, Y
  9 -- C, I, L, M, N, Q, T, V
10 -- C, F, V, W, Y
11 -- A, C, D, E, F, G, H, I, K, L, M, N, Q, R, S, T, V, W, Y
12 -- A, C, D, H, I, L, M, N, S, T, V, Y
13 -- C, I, M, Q
14 -- A, C, D, E, F, G, H, I, K, L, M, N, Q, R, S, T, V, W, Y
15 -- A, C, D, E, F, G, H, I, K, L, M, N, Q, R, S, T, V, W, Y
16 -- C, F, I, L, M, T, V
17 -- A, C, D, E, F, G, H, I, K, L, M, N, Q, R, S, T, V, W, Y
18 -- A, C, D, E, F, G, H, I, K, L, M, N, Q, R, S, T, V, W, Y
19 -- A, C, D, E, F, G, H, I, K, L, M, N, Q, R, S, T, V, W, Y
20 -- A, C, D, E, F, G, H, K, L, M, N, Q, R, S, T, W
21 -- A, C, D, E, F, G, H, I, K, L, M, N, Q, R, S, T, V, W, Y
22 -- A, C, D, F, G, H, I, L, M, N, P, Q, S, T, V, W, Y
23 -- C, E, M, N, P, Q, S, T, V
24 -- A, C, D, E, F, G, H, K, L, M, N, P, Q, R, S, T, V, W, Y
25 -- A, C, G, M, N, Q, S, T, V
26 -- M, N, V
27 -- A, C, D, E, F, G, H, I, K, L, M, N, Q, R, S, T, V, W, Y
28 -- A, C, G, I, L, S, T, V
29 -- A, C, S, V, W
30 -- D
31 -- A, C, D, F, G, H, I, K, L, M, N, Q, R, S, T, V, W, Y
32 -- C, F, H, I, L, M, N, P, T, V
33 -- A, C, D, E, F, G, H, I, K, L, M, N, P, Q, R, S, T, V, W, Y
34 -- A, C, D, E, F, G, H, I, K, L, M, N, P, Q, R, S, T, V, W, Y
35 -- A, C, D, F, H, M, Q, V, W, Y
36 -- A, C, D, E, G, H, I, L, M, N, Q, R, S, T, V, W, Y
37 -- A, C, D, E, F, G, H, I, K, L, M, N, P, Q, R, S, T, V, W, Y
38 -- A, C, D, E, F, G, H, I, K, L, M, N, Q, R, S, T, V, W, Y
39 -- A, C, D, E, F, G, H, K, L, M, N, P, Q, R, S, T, V, W, Y
40 -- D, E, G, H, N, P, Q
41 -- A, C, D, E, F, G, H, I, K, L, M, N, P, Q, R, S, T, V, W, Y
42 -- A, C, D, E, F, G, H, I, K, L, M, N, P, Q, R, S, T, V, W, Y
43 -- A, C, D, E, F, G, H, I, K, L, M, N, P, Q, R, S, T, V, W, Y
44 -- A, C, D, E, F, G, H, I, K, L, M, Q, R, S, V, W, Y
45 -- A, C, D, E, F, G, H, I, K, L, M, N, P, Q, R, S, T, V, W, Y
46 -- A, C, D, E, F, G, H, I, K, L, M, N, P, Q, R, S, T, V, W, Y
47 -- A, C, G, P, S, T, V
48 -- A, C, D, E, F, G, H, I, K, L, M, N, Q, R, S, T, V, W, Y
49 -- A, C, D, E, F, G, H, I, K, L, M, N, Q, R, S, T, V, W, Y
50 -- A, C, D, E, F, G, H, I, K, L, M, N, Q, R, S, T, V, W, Y
51 -- A, C, E, F, G, H, I, K, L, M, N, Q, R, S, T, V, W, Y
52 -- A, C, D, E, F, G, H, I, K, L, M, N, P, Q, R, S, T, V, W, Y
53 -- A, C, D, E, F, G, H, I, K, L, M, N, P, Q, R, S, T, V, W, Y
54 -- A, C, D, E, F, G, H, I, K, L, M, N, P, Q, R, S, T, V, W, Y
55 -- A, C, D, E, F, G, H, I, K, L, M, N, P, Q, R, S, T, V, W, Y
56 -- A, C, D, E, F, G, H, I, K, L, M, N, P, Q, R, S, T, V, W, Y
LCB2 (SEQ ID NOS: 11-12)
  1 -- A, C, D, E, G, N, P, S, T
  2 -- D, M, P, Q, Y
  3 --A, D, E, N, Q
  4 -- C, D, E, V
  5 -- D
  6 -- A, C, D, E, G, N, Q, S, T, V
  7 -- A, C, G, I, L, M, P, S, T, V
  8 -- A, C, E, F, G, H, I, K, L, M, N, Q, R, S, T, V, W, Y
  9 -- D, N, Y
10 -- I, L, T
11 -- C, E, G, I, L, M, W
12 -- F, H, Y
13 -- E, M, Q, R, V
14 -- A, C, E, F, G, H, I, K, L, M, N, Q, R, S, T, V, W, Y
15 -- A, C, D, E, G, H, I, K, L, M, N, Q, R, S, T, V
16 -- C, H, L, T
17 -- A, C, D, E, F, G, H, I, K, L, M, N, P, Q, R, S, T, V, W, Y
18 -- A, C, D, E, F, G, H, I, K, L, M, N, Q, R, S, T, V, W, Y
19 -- A, C, D, E, F, G, H, I, K, L, M, N, P, Q, R, S, T, V, W, Y
20 -- A, C, E, F, G, H, I, K, L, M, N, P, Q, R, S, T, V, Y
21 -- A, C, D, E, F, G, H, I, K, L, M, N, P, Q, R, S, T, V, W, Y
22 -- A, C, D, E, G, I, K, L, N, P, Q, R, S, T, V
23 -- A, C, D, E, F, G, H, I, K, L, M, N, P, Q, R, S, T, V, W, Y
24 -- A, C, D, E, F, G, H, I, K, L, M, N, P, Q, R, S, T, V, W, Y
25 -- A, C, E, G, H, I, K, N, P, Q, R, S, T, Y
26 -- A, C, D, E, F, G, H, I, K, L, M, N, P, Q, R, S, T, V, W, Y
27 -- A, C, D, E, F, G, H, I, K, L, M, N, P, Q, R, S, T, V, W, Y
28 -- H, K, R, T, Y
29 -- C, D, E, H, I, K, L, M, N, P, Q, R, S, T, V, Y
30 -- A, C, D, E, F, G, H, I, K, L, M, N, P, Q, S, T, V, W, Y
31 -- A, C, D, E, F, G, H, I, K, L, M, N, P, Q, R, S, T, V, Y
32 -- F, H, I, K, L, M, P, Q, R, Y
33 -- A, C, G, P, S, T
34 -- A, C, D, E, F, G, H, I, K, L, M, N, Q, R, S, T, V, W, Y
35 -- F, H, Y
36 -- A, C, E, H, I, L, M, S, V
37 -- A, C, E, G, H, L, M, Q, R, S, T, V, W
38 -- A, C, D, E, F, G, H, I, K, L, M, N, P, Q, R, S, T, V, W, Y
39 -- A, C, D, E, G, H, I, K, L, M, N, P, Q, R, S, T, V
40 -- A, C, D, E, G, H, I, K, L, M, N, P, Q, R, S, T, V, W, Y
41 -- A, C, D, E, F, G, H, I, K, L, M, N, P, Q, R, S, T, V, W, Y
42 -- A, C, D, E, F, G, H, I, K, L, M, N, P, Q, R, S, T, V, W, Y
43 -- A, C, D, E, F, G, H, I, K, L, M, N, P, Q, R, S, T, V, W, Y
44 -- A, C, D, E, F, G, H, I, K, L, M, N, P, Q, R, S, T, V, W, Y
45 -- A, C, E, F, I, L, M, P, S, T, V, W, Y
46 -- A, C, D, E, F, G, H, I, K, L, M, N, P, Q, R, S, T, V, W, Y
47 -- A, C, D, E, F, G, H, I, K, L, M, N, P, Q, R, S, T, V, W, Y
48 -- A, C, D, E, F, G, H, I, K, L, M, N, P, Q, R, S, T, V, W, Y
49 -- A, C, E, F, G, H, I, K, L, M, N, P, Q, R, S, T, V, W, Y
50 -- A, C, D, E, F, G, H, I, K, L, M, N, P, Q, R, S, T, V, W, Y
51 -- A, C, D, E, F, G, H, I, K, L, M, N, P, Q, R, S, T, V, W, Y
52 -- A, C, D, E, F, G, H, I, K, L, M, N, P, Q, R, S, T, V, W, Y
53 -- A, C, D, E, F, G, H, I, K, L, M, N, P, Q, R, S, T, V, W, Y
54 -- A, C, D, E, F, G, H, I, K, L, M, N, P, Q, R, S, T, V, W, Y
55 -- A, C, D, E, F, G, H, I, K, L, M, N, P, Q, R, S, T, V, W, Y
56 -- A, C, D, E, F, G, H, I, K, L, M, N, P, Q, R, S, T, V, W, Y
LCB3 (SEQ ID NOS: 13-17, 19-21 and 137-163)
  1 -- C, E, F, I, M, N, T, W
  2 -- A, C, D, E, F, G, H, I, K, L, M, N, P, Q, R, S, T, V, W, Y
  3 -- D, G, L, M, N, S, Y
  4 -- A, C, E, F, H, K, Q, T
  5 -- A, C, E, F, G, H, I, K, L, M, N, Q, R, S, T, V, W, Y
  6 -- A, C, D, E, F, G, H, I, K, L, M, N, P, Q, R, S, T, V, W, Y
  7 -- A, C, D, F, I, L, M, P, R, S, V, W
  8 -- A, C, D, E, F, G, H, I, K, L, M, N, Q, R, S, T, V, W, Y
  9 -- A, C, E, F, G, H, I, L, M, N, Q, R, S, T, V, Y
10 -- A, C, F, G, H, K, M, N, Q, R, S, T, Y
11 -- D, F, H, L, M, N, Q
12 -- A, C, D, E, F, G, H, I, K, L, M, N, P, Q, R, S, T, V, W, Y
13 -- A, F, I, L, M, N, Q, S, T, V
14 -- A, C, F, G, H, I, K, L, M, N, P, Q, R, S, T, V, W, Y
15 -- A, C, D, E, F, G, H, I, K, L, M, N, P, Q, R, S, T, V, W, Y
16 -- A, C, D, E, F, G, H, I, L, M, N, P, Q, R, S, T, V, W, Y
17 -- A, C, D, F, G, H, I, K, L, M, N, P, Q, R, S, T, V, W
18 -- A, C, D, E, F, G, H, I, K, L, M, N, P, Q, R, S, T, V, W, Y
19 -- A, C, D, E, F, G, H, I, K, L, M, N, P, Q, R, S, T, V, W, Y
20 -- A, C, D, E, F, G, H, I, K, L, M, N, P, Q, R, S, T, V, W, Y
21 -- A, C, D, E, F, G, H, I, K, L, M, N, P, Q, R, S, T, V, W, Y
22 -- A, C, D, E, F, G, H, I, K, L, M, N, P, Q, R, S, T, V, W, Y
23 -- A, C, D, E, F, G, H, I, K, L, M, N, P, Q, R, S, T, V, W, Y
24 -- A, C, D, E, F, G, H, I, K, L, M, N, P, Q, R, S, T, V, W, Y
25 -- A, C, D, E, F, G, H, I, K, L, M, N, P, Q, R, S, T, V, W, Y
26 -- A, C, D, E, F, G, H, I, K, L, M, N, P, Q, R, S, T, V, W, Y
27 -- A, C, D, E, F, G, H, I, K, L, M, N, P, Q, R, S, T, V, W, Y
28 -- A, C, D, E, F, G, H, I, K, L, M, N, P, Q, R, S, T, V, W, Y
29 -- A, C, D, E, F, G, I, L, M, N, P, S, T, V, W, Y
30 -- C, E, F, H, L, N, S,W, Y
31 -- A, C, D, E, F, G, H, I, K, L, M, N, P, Q, R, S, T, V, W, Y
32 -- A, C, D, E, F, G, H, I, K, L, M, N, P, Q, R, S, T, V, W, Y
33 -- A, C, E, F, I, K, P, Q, S, V, W, Y
34 -- A, D, E, F, G, H, M, N, P, Q, R, S, V, W, Y
35 -- A, C, D, E, F, G, H, I, K, L, M, N, P, Q, R, S, T, V, W, Y
36 -- A, C, E, G, H, I, M, N, Q, S, T, V
37 -- A, C, D, E, F, G, H, I, K, L, M, N, P, Q, R, S, T, V, W, Y
38 -- A, C, D, E, F, G, H, I, K, L, M, N, P, Q, R, S, T, V, W, Y
39 -- A, C, D, E, F, G, H, I, K, L, M, N, P, Q, R, S, T, V, W, Y
40 -- A, C, D, E, F, G, H, K, L, M, N, P, Q, R, S, T, V, W, Y
41 -- A, C, D, E, F, G, H, I, K, L, M, N, P, Q, R, S, T, V, W, Y
42 -- A, C, D, E, F, G, H, I, K, L, M, N, P, Q, R, S, T, V, W, Y
43 -- A, C, D, E, F, G, H, I, K, L, M, N, P, Q, R, S, T, V, W, Y
44 -- A, C, D, E, F, G, H, I, K, L, M, N, P, Q, R, S, T, V, W, Y
45 -- A, C, D, E, F, G, H, I, K, L, M, N, P, Q, R, S, T , V, W, Y
46 -- A, C, D, E, F, G, H, I, K, L, M, N, P, Q, R, S, T, V, W, Y
47 -- A, C, D, E, F, G, H, I, K, L, M, N, P, Q, R, S, T, V, W, Y
48 -- A, C, E, F, G, I, K, L, M, N, P, Q, S, T, V, W
49 -- A, C, D, E, F, G, H, I, K, L, M, N, P, Q, R, S, T, V, W, Y
50 -- A, C, D, E, F, G, H, I, K, L, M, N, P, Q, R, S, T, V, W, Y
51 -- A, C, D, E, F, G, H, I, K, L, M, N, P, Q, R, S, T, V, W, Y
52 -- A, C, D, E, F, G, H, I, K, L, M, N, P, Q, R, S, T, V, W, Y
53 -- A, C, D, E, F, G, H, I, K, L, M, N, P, Q, R, S, T, V, W, Y
54 -- A, C, D, E, F, G, H, I, K, L, M, N, P, Q, R, S, T, V, W, Y
55 -- A, C, E, F, G, H, I, K, L, M, N, Q, S, T, V, W, Y
56 -- A, C, D, E, F, G, H, I, K, L, M, N, P, Q, R, S, T, V, W, Y
57 -- A, C, D, E, F, G, H, I, K, L, M, N, P, Q, R, S, T, V, W, Y
58 -- A, C, D, E, F, G, H, I, K, L, M, N, P, Q, R, S, T, V, W, Y
59 -- A, C, D, E, F, G, H, I, K, L, M, N, P, Q, R, S, T, V, W, Y
60 -- A, C, D, E, F, G, H, I, K, L, M, N, P, Q, R, S, T, V, W, Y
61 -- A, C, D, E, F, G, H, I, K, L, M, N, P, Q, R, S, T, V, W, Y
62 -- A, C, D, E, F, G, H, I, K, L, M, N, P, Q, R, S, T , V, W, Y
63 -- A, C, D, E, F, G, H, I, K, L, M, N, P, Q, R, S, T, V, W, Y
64 -- A, C, D, E, F, G, H, I, K, L, M, N, P, Q, R, S, T, V, W, Y
LCB4 (SEQ ID NO: 23-24)
  1 -- A, C, D, E, F, G, H, I, K, L, M, N, P, Q, R, S, T, V, W, Y
  2 -- A, C, D, E, F, G, H, I, K, L, M, N, P, Q, R, S, T, V, W, Y
  3 -- A, C, D, E, F, G, H, I, K, L, M, N, P, Q, R, S, T, V, W, Y
  4 -- A, C, D, E, F, G, H, I, K, L, M, N, P, Q, R, S, T, V, W, Y
  5 -- C, D, H, K, N, Q, R, Y
  6 -- A, C, F, G, I, K, L, M, P, Q, R, S, T, V, Y
  7 -- A, C, D, E, F, G, H, I, K, L, M, N, P, Q, R, S, T, V, W, Y
  8 -- A, C, H, I, M, N, Q, R, S, T, V, Y
  9 -- A, C, D, G, H, I, K, L, M, N, Q, R, S, T, V, Y
10 -- A, C, D, E, M, N, P, Q, S, T, V
11 -- C, D, G, H, I, K, L, M, N, P, R, S, T, V
12 -- F, G, I, L
13 -- F, I, L, M, S, V, Y
14 -- A, C, D, E, G, L, M, N, Q, R, S, T, V
15 -- C, E, F, G, H, I, L, M, S, V, W, Y
16 -- A, G, T, Y
17 -- A, C, D, E, F, G, H, I, K, L, M, N, Q, R, S, T, V, W, Y
18 -- A, C, D, E, F, G, H, I, K, L, M, N, Q, R, S, T, V, W, Y
19 -- A, C, D, E, F, G, H, I, K, L, M, N, Q, R, S, T, V, W, Y
20 -- A, C, D, E, F, G, H, I, K, L, M, N, P, Q, R, S, T, V, W, Y
21 -- C, D, Q, Y
22 -- A, C, D, E, F, G, H, I, K, L, M, N, P, Q, R, S, T, V, W, Y
23 -- E, F, H, Y
24 -- A, F, G, I, L, M, W
25 -- A, C, E, G, H, I, K, L, M, N, Q, R, S, T, V, Y
26 -- C, F, H, I, L, N, S, T, V, W
27 -- D, Q, W, Y
28 -- A, C, D, I, L, V, Y
29 -- A, C, E, G, K, L, N, Q, R, S, T
30 -- C, I, L, M, P, T, V
31 -- C, D, E
32 -- A, C, E, I, L, M, Q, S, T, V, Y
33 -- A, C, E, F, G, H, I, K, L, M, Q, R, S, T, V, Y
34 -- C, D, F, G, H, L, M, N, P, R, S, T, W, Y
35 -- A, C, E, F, G, H, I, K, L, N, P, R, T, V, W
36 -- A, C, G, S, T, V
37 -- A, C, D, E, G, H, I, K, L, M, N, P, Q, R, S, T, V, Y
38 -- A, C, D, E, F, G, H, I, K, L, M, N, P, Q, R, S, T, V, W, Y
39 -- A, C, D, E, F, G, H, I, K, L, M, N, P, Q, R, S, T, V, W, Y
40 -- A, C, D, E, F, G, H, I, K, L, M, N, Q, R, S, T, V, Y
41 -- A, C, D, E, G, H, K, N, Q, S, W
42 -- A, C, D, E, F, G, H, I, K, L, M, N, P, Q, R, S, T, V, W, Y
43 -- A, C, D, E, F, G, H, I, K, L, M, N, P, Q, R, S, T, V, Y
44 -- A, E, F, G, H, I, K, L, M, N, Q, R, S, T, V
45 -- A, C, E, F, G, H, I, K, L, M, N, Q, R, S, T, V, W, Y
46 -- A, C, D, E, F, G, H, I, K, L, M, N, Q, R, S, T, V, W, Y
47 -- A, C, D, E, F, G, H, I, K, L, M, N, Q, R, S, T, V, W, Y
48 -- A, C, M, S, T, V
49 -- A, H, I, K, L, M, N, Q, R, S, T, V, W, Y
50 -- A, C, D, E, F, G, H, I, K, L, M, N, P, Q, R, S, T, V, W, Y
51 -- A, F, I, K, L, M, R, T, V, W, Y
52 -- F, I, K, L, M, V
53 -- A, C, D, E, F, G, H, I, K, L, M, N, Q, R, S, T, V, W, Y
54 -- A, C, D, E, F, G, H, I, K, L, M, N, P, Q, R, S, T, V, W, Y
55 -- A, C, F, G, H, I, K, L, M, N, Q, R, S, T, V, W, Y
56 -- A, C, D, E, F, G, H, I, K, L, M, N, P, Q, R, S, T, V, W, Y
LCB5 (SEQ ID NO: 25-26)
  1 -- A, C, D, E, F, G, H, I, K, L, M, N, P, Q, R, S, T, V, W, Y
  2 -- A, C, D, E, F, G, H, I, K, L, M, N, P, Q, R, S, T, V, W, Y
  3 -- A, C, D, E, F, G, H, I, K, L, M, N, P, Q, R, S, T, V, W, Y
  4 -- A, C, D, E, F, G, H, I, K, L, M, N, P, Q, R, S, T, V, W, Y
  5 -- A, C, D, E, F, G, H, I, K, L, M, N, P, Q, R, S, T, V, W, Y
  6 -- A, C, D, E, F, G, H, I, K, L, M, N, P, Q, R, S, T, V, W, Y
  7 -- A, C, D, E, F, G, H, I, K, L, M, N, P, Q, R, S, T, V, W, Y
  8 -- A, C, D, E, F, G, H, I, K, L, M, N, P, Q, R, S, T, V, W, Y
  9 -- A, C, E, F, G, H, I , L, M, N, Q, S, T, V, W, Y
10 -- A, C, D, E, F, G, H, I, K, L, M, N, P, Q, R, S, T, V, W, Y
11 -- A, C, D, E, F, G, H, I, K, L, M, N, P, Q, R, S, T, V, W, Y
12 -- A, C, D, E, F, G, H, I, L, M, N, P, Q, R, S, T, V, W, Y
13 -- A, C, D, E, F, G, H, I, K, L, M, N, P, Q, R, S, T, V, W, Y
14 -- A, C, D, E, F, G, H, I , K, L, M, N, P, Q, R, S, T, V, W, Y
15 -- A, C, D, E, F, G, H, I, K, L, M, N, P, Q, R, S, T, V, W, Y
16 -- A, C, D, E, F, G, H, I, K, L, M, N, P, Q, R, S, T, V, W, Y
17 -- A, C, D, E, F, G, H, I, K, L, M, N, P, Q, R, S, T, V, W, Y
18 -- A, C, D, E, F, G, H, I, K, L, M, N, P, Q, R, S, T, V, W, Y
19 -- A, C, D, E, F, G, H, I, K, L, M, N, P, Q, R, S, T, V, W, Y
20 -- A, C, D, E, F, G, H, I , K, L, M, N, P, Q, R, S, T, V, W, Y
21 -- A, C, D, E, F, G, H, I, K, L, M, N, P, Q, R, S, T, V, W, Y
22 -- A, C, D, E, F, G, H, I, K, L, M, N, P, Q, R, S, T, V, W, Y
23 -- A, C, D, E, F, G, H, I, L, M, N, P, Q, R, S, T, W, Y
24 -- A, C, D, E, F, G, H, I, L, M, N, P, Q, S, T, V, W, Y
25 -- A, C, D, E, F, G, H, I, K, L, M, N, P, Q, R, S, T, V, W, Y
26 -- A, C, D, E, F, G, H, I, K, L, M, N, P, Q, R, S, T, V, W, Y
27 -- A, C, G, H, I, S, T, V
28 -- A, C, D, E, F, G, H, I, K, L, M, N, Q, R, S, T, V, W, Y
29 -- A, C, D, E, F, G, H, I, K, L, M, N, P, Q, R, S, T, V, W, Y
30 -- A, C, D, E, F, G, H, I, K, L, M, N, P, Q, R, S, T, V, W, Y
31 -- A, C, E, F, H, I, K, L, M, N, Q, S, T, V, W, Y
32 -- A, C, D, E, F, G, H, I, K, L, M, N, P, Q, R, S, T, V, W, Y
33 -- A, C, D, E, F, G, H, I, K, L, M, N, P, Q, R, S, T, V, W, Y
34 -- A, C, D, E, F, G, H, I, K, L, M, N, P, Q, R, S, T, V, W, Y
35 -- A, C, D, E, F, G, H, I, K, L, M, N, Q, R, S, T, V, W, Y
36 -- A, C, D, E, F, G, H, I, K, L, M, N, P, Q, R, S, T, V, W, Y
37 -- A, C, D, E, F, G, H, I, L, M, N, P, Q, R, S, T, V, W, Y
38 -- A, C, D, E, G, I, L, M, N, P, Q, S, T, V, W
39 -- A, C, F, G, L, M, N, S, T, V, W
40 -- A, C, E, F, G, H, I, K, L, M, N, Q, R, S, T, V, Y
41 -- C, H, I, L, M, P, R
42 -- A, C, E, G, H, I, L, M, P, T, V, Y
43 -- C, I, L, M, Q, T, V
44 -- A, C, D, F, G, H, I, M, S, T
45 -- D, Y
46 -- A, C, D, F, I, L, R, V
47 -- C, E, G, I, V
48 -- F, I, V, W, Y
49 -- A, C, D, E, F, G, H, I, K, L, M, N, Q, R, S, T, V, W, Y
50 -- A, C, E, F, G, H, I, K, L, M, N, Q, R, S, T, V, W, Y
51 -- A, C, D, E, F, G, H, I, K, L, M, N, P, Q, R, S, T, V, W, Y
52 -- C, D, E, H, I, K, N, P, Q, R, S, T, Y
53 -- A, C, D, E, F, G, H, I, K, L, M, N, P, Q, R, S, T, V, W, Y
54 -- A, C, D, E, F, G, H, I, K, L, M, N, P, Q, R, S, T, V, W, Y
55 -- A, C, D, E, F, G, H, I, K, L, M, N, P, Q, R, S, T, V, W, Y
56 -- F, I, L, M, T, V, W
57 -- A, C, D, E, F, G, H, N, P, Q, R, S, T, W, Y
58 -- A, C, D, E, F, G, H, I, K, L, M, N, P, Q, R, S, T, V, W, Y
59 -- A, C, F, I, L, M, T, V, Y
60 -- C, F, M, N, V, Y
61 -- A, C, D, E, F, G, H, I, K, L, M, N, Q, R, S, T, V, W, Y
62 -- A, C, F, G, I, L, M, S, T, V, W
63 -- A, C, E, F, G, H, I, K, L, M, N, Q, R, S, T, V, W, Y
64 -- A, C, E, F, G, H, K, L, N, P, R, S, T, W, Y
65 -- A, C, D, E, F, G, H, I, K, L, M, N, P, Q, R, S, T, V, W, Y
LCB6 (SEQ ID NO: 27-28)
  1 -- A, C, D, E, F, G, H, I, K, L, M, N, P, Q, R, S, T, V, W, Y
  2 -- A, C, D, E, F, G, H, I, K, L, M, N, P, Q, R, S, T, V, W, Y
  3 -- E, W
  4 -- A, C, D, E, F, G, H, I , K, L, M, N, P, Q, R, S, T, V, W, Y
  5 -- A, C, D, E, F, G, H, I, K, L, M, N, P, Q, R, S, T, V, W, Y
  6 -- F, L, M, R, S
  7 -- H, T, V
  8 -- A, C, D, E, F, G, H, I , K, L, M, N, P, Q, R, S, T, V, W, Y
  9 -- F, M
10 -- A, K, L, W
11 -- D, E, G, V, Y
12 -- A, C, D, E, F, G, H, I, K, L, M, N , P, Q, R, S, T, V, W, Y
13 -- E, L
14 -- A, C, D, E, F, G, H, I, K, L, M, N, P, Q, R, S, T, V, W, Y
15 -- A, C, D, E, F, G, H, I, K, L, M, N, P, Q, R, S, T, V, W, Y
16 -- A, C, D, E, F, G, H, I, K, L, M, N, P, Q, R, S, T, V, W, Y
17 -- F, N, P, S
18 -- A, C, D, E, F, G, H, I, K, L, M, N, P, Q, R, S, T, V, W, Y
19 -- L, N, Q, V
20 -- A, C, D, E, F, G, H, I, K, L, M, N, P, Q, R, S, T, V, W, Y
21 -- A, C, D, E, F, G, H, I, K, L, M, N, P, Q, R, S, T, V, W, Y
22 -- A, C, D, E, F, G, H, I, K, L, M, N, P, Q, R, S, T, V, W, Y
23 -- C, D, P, Q, R, W
24 -- A, C, D, E, F, G, H, I, K, L, M, N, P, Q, R, S, T, V, W, Y
25 -- A, C, D, E, F, G, H, I, K, L, M, N, P, Q, R, S, T, V, W, Y
26 -- A, C, D, E, F, G, H, I, K, L, M, N, P, Q, R, S, T, V, W, Y
27 -- D, H, L, S, W
28 -- A, C, D, E, F, G, H, I, K, L, M, N, P, Q, R, S, T, V, W, Y
29 -- A, C, D, E, F, G, H, I, K, L, M, N, P, Q, R, S, T, V, W, Y
30 -- L, Q, V, W
31 -- I, K, L, S
32 -- A, C, D, E, F, G, H, I, K, L, M, N, P, Q, R, S, T, V, W, Y
33 -- A, C, D, E, F, G, H, I, K, L, M, N, P, Q, R, S, T, V, W, Y
34 -- A, F, L, T, V
35 -- C, D, G, H, K, L, N, T
36 -- A, C, D, E, F, G, H, I, K, L, M, N, P, Q, R, S, T, V, W, Y
37 -- A, C, D, E, F, G, H, I, K, L, M, N, P, Q, R, S, T, V, W, Y
38 -- A, C, D, E, F, G, H, I, K, L, M, N, P, Q, R, S, T, V, W, Y
39 -- A, C, D, E, F, G, H, I, K, L, M, N, P, Q, R, S, T, V, W, Y
40 -- A, C, D, E, F, G, H, I, K, L, M, N, P, Q, R, S, T, V, W, Y
41 -- A, C, D, E, F, G, H, I, K, L, M, N, P, Q, R, S, T, V, W, Y
42 -- A, C, D, E, F, G, H, I, K, L, M, N, P, Q, R, S, T, V, W, Y
43 -- A, C, D, E, F, G, H, I, K, L, M, N, P, Q, R, S, T, V, W, Y
44 -- F, I
45 -- A, C, D, E, F, G, H, I, K, L, M, N, P, Q, R, S, T, V, W, Y
46 -- A, C, D, E, F, G, H, I, K, L, M, N, P, Q, R, S, T, V, W, Y
47 -- A, C, D, E, F, G, H, I, K, L, M, N, P, Q, R, S, T, V, W, Y
48 -- L, Q, R, T
49 -- A, C, D, E, F, G, H, I, K, L, M, N, P, Q, R, S, T, V, W, Y
50 -- A, C, D, E, F, G, H, I, K, L, M, N, P, Q, R, S, T, V, W, Y
51 -- C, V, Y
52 -- A, E, H, K
53 -- A, C, D, E, F, G, H, I, K, L, M, N, P, Q, R, S, T, V, W, Y
54 -- A, C, D, E, F, G, H, I, K, L, M, N, P, Q, R, S, T, V, W, Y
55 -- C, F, H, L, P, W, Y
56 -- A, C, D, E, F, G, H, I, K, L, M, N, P, Q, R, S, T, V, W, Y
LCB7 (SEQ ID NO: 29-30)
  1 -- A, C, D, E, F, G, H, I, K, L, M, N, P, Q, R, S, T, V, W, Y
  2 -- A, C, D, E, F, G, H, I, K, L, M, N, P, Q, R, S, T, V, W, Y
  3 -- A, C, D, E, F, G, H, I, K, L, M, N, P, Q, R, S, T, V, W, Y
  4 -- I, T, V
  5 -- A, C, D, E, F, G, H , I, K, L, M, N, P, Q, R, S, T, V, W, Y
  6 -- A, C, D, E, F, G, H, I, K, L, M, N, P, Q, R, S, T, V, W, Y
  7 -- L, P, Y
  8 -- A, C, D, E, F, G, H, I, K, L, M, N, P, Q, R, S, T, V, W, Y
  9 -- A, C, D, E, F, G, H, I, K, L, M, N, P, Q, R, S, T, V, W, Y
10 -- A, C, D, E, F, G, H, I, K, L, M, N, P, Q, R, S, T, V, W, Y
11 -- A
12 -- A, C, D, E, F, G, H, I, K, L, M, N, P, Q, R, S, T, V, W, Y
13 -- A, L, P
14 -- H, L, R, T, Y
15 -- A, C, D, E, F, G, H, I, K, L, M, N, P, Q, R, S, T, V, W, Y
16 -- A, C, D, E, F, G, H, I, K, L, M, N, P, Q, R, S, T, V, W, Y
17 -- A, C, D, E, F, G, H, I, K, L, M, N, P, Q, R, S, T, V, W, Y
18 -- A, C, D, E, F, G, H, I, K, L, M, N, P, Q, R, S, T, V, W, Y
19 -- A, C, D, E, F, G, H, I, K, L, M, N, P, Q, R, S, T, V, W, Y
20 -- A, C, D, E, F, G, H, I, K, L, M, N, P, Q, R, S, T, V, W, Y
21 -- A, C, D, E, F, G, H, I, K, L, M, N, P, Q, R, S, T, V, W, Y
22 -- A, C, D, E, F, G, H, I, K, L, M, N, P, Q, R, S, T, V, W, Y
23 -- A, S
24 -- A, C, D, E, F, G, H, I, K, L, M, N, P, Q, R, S, T, V, W, Y
25 -- A, C, D, E, F, G, H, I, K, L, M, N, P, Q, R, S, T, V, W, Y
26 -- C, G, S, V, Y
27 -- K, L, M, W
28 -- A, C, D, E, F, G, H, I, K, L, M, N, P, Q, R, S, T, V, W, Y
29 -- A, C, D, E, F, G, H, I, K, L, M, N, P, Q, R, S, T, V, W, Y
30 -- A, Y
31 -- A, C, D, E, F, G, H, I, K, L, M, N, P, Q, R, S, T, V, W, Y
32 -- A, C, D, E, F, G, H, I, K, L, M, N, P, Q, R, S, T, V, W, Y
33 -- A, C, F, I, K, L, V, W
34 -- A, H, L
35 -- A, C, D, E, F, G, H, I, K, L, M, N, P, Q, R, S, T, V, W, Y
36 -- A, C, D, E, F, G, H, I, K, L, M, N, P, Q, R, S, T, V, W, Y
37 -- A, C, D, E, F, G, H, I, K, L, M, N, P, Q, R, S, T, V, W, Y
38 -- A, C, D, E, F, G, H, I, K, L, M, N, P, Q, R, S, T, V, W, Y
39 -- A, C, K, L, M, N
40 -- A, C, D, E, F, G, H, I, K, L, M, N, P, Q, R, S, T, V, W, Y
41 -- A, C, D, E, F, G, H, I, K, L, M, N, P, Q, R, S, T, V, W, Y
42 -- A, C, D, L, V
43 -- A, C, D, E, F, G, H, I, K, L, M, N, P, Q, R, S, T, V, W, Y
44 -- A, C, D, E, F, G, H, I, K, L, M, N, P, Q, R, S, T, V, W, Y
45 -- A, C, D, E, F, G, H, I, K, L, M, N, P, Q, R, S, T, V, W, Y
46 -- Q, S, V
47 -- A, C, D, E, F, G, H, I, K, L, M, N, P, Q, R, S, T, V, W, Y
48 -- A, C, D, E, F, G, H, I, K, L, M, N, P, Q, R, S, T, V, W, Y
49 -- E, L
50 -- A, C, D, E, F, G, H, I, K, L, M, N, P, Q, R, S, T, V, W, Y
51 -- A, C, D, E, F, G, H, I, K, L, M, N, P, Q, R, S, T, V, W, Y
52 -- A, C, D, E, F, G, H, I, K, L, M, N, P, Q, R, S, T, V, W, Y
53 -- I
54 -- A, C, D, E, F, G, H, I, K, L, M, N, P, Q, R, S, T, V, W, Y
55 -- A, C, D, E, F, G, H, I, K, L, M, N, P, Q, R, S, T, V, W, Y
56 -- L, M, N, R
57 -- A, C, D, E, F, G, H, I, K, L, M, N, P, Q, R, S, T, V, W, Y
LCB8 (SEQ ID NO: 31-32)
  1 -- A, C, D, E, F, G, H, I, K, L, M, N, P, Q, R, S, T, V, W, Y
  2 -- C, F, I, L, M, S, V, W, Y
  3 -- A, C, E, F, G, H, I, K, L, M, N, P, Q, R, S, T, V, W, Y
  4 -- A, C, D, E, F, G, H, I, K, L, M, N, Q, R, S, T, V, W, Y
  5 -- A, C, F, G, I, K, L, M, Q, S, T, V, W, Y
  6 -- H, I, K, L,M
  7 -- A, H, I, K, L, M, N, P, Q, R, W, Y
  8 -- A, C, D, E, F, G, H, I, K, L, M, N, Q, R, S, T, V, W, Y
  9 -- A, C, F, G, I, L, M, S, Y
10 -- A, F, H, K, L, M, Q, R, S
11 -- A, C, D, E, F, G, H, I, K, L, M, N, Q, R, S, T, V, W, Y
12 -- A, C, D, E, G, H, I, K, L, M, N, Q, R, S, T, V, W, Y
13 -- A, C, D, E, F, G, H, M, N, Q, S, W, Y
14 -- C, D, E, H, N, Q, S
15 -- A, D, E, F, H, I, L, M, N, P, Q, S, T, V, W, Y
16 -- C, F, M, N, R, Y
17 -- A, C, I, L, M, Q, R, V
18 -- A, C, F, H, I, L, M, T, V, Y
19 -- I, Q, S
20 -- D, N
21 -- A, C, G, S, V
22 -- A, C, I, L, M, V
23 -- C, F, R, T, W, Y
24 -- A, C, D, E, F, G, H, I, L, M, N, Q, R, S, T, V, W, Y
25 -- C, E, S, T, V, Y
26 -- A, C, D, E, F, G, H, N, Q, S, T
27 -- A, C, D, E, G, H, I, K, L, M, N, Q, R, S, T, V
28 -- C, E, F, G, H, I, K, L, M, Q, R, W, Y
29 -- A, C, F, G, H, I, K, L, M, N, Q, R, S, T, V, Y
30 -- A, C, E, G, H, K, M, N, P, Q, R, T
31 -- A, C, D, E, F, G, H, I, K, L, M, N, Q, R, S, T, V, Y
32 -- A, C, D, E, G, H, I, K, N, Q, R, S, T, W
33 -- A, C, E, G, H, K, M, N, P, Q, R, S, W, Y
34 -- C, D, E, F, H, M, N, W, Y
35 -- A, C, D, E, F, G, H, I, K, L, M, N, P, Q, R, S, T, V, Y
36 -- A, C, D, E, F, G, H, K, L, M, N, Q, R, S, T, V, W, Y
37 -- F, G, H, I, L, M, S, T, Y
38 -- D, E, H, Q, W, Y
39 -- C, D, E, F, G, H, K, L, M, N, P, Q, R, S, T, V, W, Y
40 -- A, C, E, G, H, I, K, M, P, V, Y
41 -- C, F, H, I, K, L, M, R, S, T, V
42 -- E, F, I, T, W, Y
43 -- A, C, D, E, F, H, I, L, M, N, Q, R, S, T, V, W, Y
44 -- C, G, I, K, L, M, T, V, Y
45 -- G, S, W, Y
46 -- C, I, K, L, M, N, Q, R, S, T
47 -- A, C, E, N, Q, S,T,V
48 -- C, D, E, F, H, I, L, M,W
49 -- C, D, F, H, K, L, M, N, Q, R, T
50 -- A, C, D, E, N, Y
51 -- A, C, D, E, F, G, H, I, K, L, M, N, P, Q, R, S, T , V, W, Y
52 -- A, C, D, E, G, H, K, L, M, N, Q, R, S, T
53 -- A, C, D, E, F, G, H, I, L, M, N, P, Q, S, T, V, W, Y
54 -- A, C, D, E, F, G, H, I, K, L, M, N, P, Q, R, S, T, V, W, Y
55 -- A, C, D, E, F, G, H, I , K, L, M, N, P, Q, S, T, V, W, Y
56 -- C, I, L, M
57 -- A, C, D, E, G, I, N, Q, S, T
58 -- A, C, D, E, F, G, H, I, K, L, M, N, P, Q, R, S, T, V, W, Y
59 -- A, C, G, P, S
60 -- A, C, E, F, G, I, L, M, N, Q, S, T, V
61 -- A, C, D, E, F, G, H, I, K, L, M, N, P, Q, R, S, T, V, W, Y
62 -- A, C, D, E, F, G, H, I, K, L, M, N, Q, R, S, T, V, W, Y
63 -- A, C, E, F, G, H, I, L, M, N, Q, S, T, V, W, Y
64 -- A, C, D, E, G, H, I, K, L, M, N, P, Q, S, T, V
65 -- A, C, D, E, G, H, I, K, L, M, N, P, Q, R, S, T, W, Y
AHB1 (SEQ ID NOS: 33-34)
  1 -- A, C, D, E, F, G, H, I, K, L, M, N, P, Q, R, S, T, V, W, Y
  2 -- A, C, D, E, F, G, H, I, K, L, M, N, P, Q, R, S, T, V, W, Y
  3 -- A, C, D, E, F, G, H, I, K, L, M, N, P, Q, R, S, T, V, W, Y
  4 -- A, C, D, E, F, G, H, I, K, L, M, N, P, Q, R, S, T, V, W, Y
  5 -- A, C, D, E, F, G, H, I, K, L, M, N, P, Q, R, S, T, V, W, Y
  6 -- A, C, D, E, F, G, H, I, K, L, M, N, P, Q, R, S, T, V, W, Y
  7 -- A, C, D, E, F, G, H, I, K, L, M, N, P, Q, R, S, T, V, W, Y
  8 -- A, C, D, E, F, G, H, I, K, L, M, N, P, Q, R, S, T, V, W, Y
  9 -- A, C, D, E, F, G, H, I, K, L, M, N, P, Q, R, S, T, V, W, Y
10 -- A, C, F, H, I, K, L, M, N, Q, R, S, T, V, W, Y
11 -- F, N, Y
12 -- A, C, D, E, F, G, H, I, K, L, M, N, P, Q, R, S, T, V, W, Y
13 -- A, C, D, E, F, G, H, I, K, L, M, N, P, Q, R, S, T, V, W, Y
14 -- A, D, G
15 -- A, C, D, E, G, H, I, K, L, M, N, Q, R, S, T, V
16 -- A, C, D, E, F, G, H, I, K, L, M, N, P, Q, R, S, T, V, W, Y
17 -- A, C, D, E, F, G, H, I, K, L, M, N, Q, R, S, T, V, W, Y
18 -- A, C, D, E, F, G, H, I, L, M, N, Q, S, T, V, W, Y
19 -- A, C, D, E, F, G, H, I, K, L, M, N, P, Q, R, S, T, V, W, Y
20 -- A, C, D, E, F, G, H, I, K, L, M, N, P, Q, R, S, T, V, W, Y
21 -- A, C, E, G, S, V
22 -- A, C, D, E, F, G, H, I, K, L, M, N, P, Q, R, S, T, V, W, Y
23 -- A, C, D, E, F, G, H, I, K, L, M, N, P, Q, R, S, T, V, W, Y
24 -- A, C, D, E, F, H, K, L, M, N, Q, R, S, T, V, Y
25 -- A, C, D, F, G, H, L, M, N, Q, R, S, T, V, W, Y
26 -- A, C, D, E, F, G, H, I, K, L, M, N, P, Q, R, S, T, V, W, Y
27 -- A, C, D, E, F, G, H, I, K, L, M, N, P, Q, R, S, T, V, W, Y
28 -- A, C, D, E, F, G, H, K, L, M, N, P, Q, R, S, T, Y
29 -- A, C, D, E, F, G, H, I, K, L, M, N, Q, R, S, T, V, W, Y
30 -- A, D, E, F, G, H, I, K, L, M, N, P, Q, R, S, T, V, W, Y
31 -- A, C, D, E, F, G, H, I, K, L, M, N, P, Q, R, S, T, V, W, Y
32 -- A, C, D, E, F, G, H, I, K, L, M, N, P, Q, R, S, T, V, W, Y
33 -- A, G, S
34 -- A, C, D, E, F, G, H, I, K, L, M, N, P, Q, R, S, T, V, W, Y
35 -- A, C, D, E, F, G, H, I, K, L, M, N, P, Q, R, S, T, V, W, Y
36 -- A, C, D, E, F, G, H, K, L, M, N, P, Q, R, S, T, V, W, Y
37 -- A, C, D, E, F, G, H, I, K, L, M, N, P, Q, R, S, T, V, W, Y
38 -- A, C, E, G, H, M, P, Q
39 -- A, C, D, E, F, G, H, I, K, L, M, N, P, Q, R, S, T, V, W, Y
40 -- A, C, D, E, G, K, N, Q, R, S, T
41 -- A, C, D, E, F, G, H, I, L, M, N, P, Q, S, T, V, W, Y
42 -- A, C, D, E, F, G, H, I, K, L, M, N, P, Q, R, S, T, V, W, Y
43 -- A, C, D, E, F, G, H, I, K, L, M, N, Q, S, T, V, W, Y
44 -- E, F, H,Q, S, W, Y
45 -- D, N
46 -- A, C, D, E, F, G, H, I, K, L, M, N, P, Q, R, S, T, V, W, Y
47 -- C, T, V
48 -- F, S, W, Y
49 -- A, C, D, E, F, G, H, I, K, L, M, N, Q, R, S, T, V, W, Y
50 -- A, C, F, H, I, K, L, M, N, Q, R, S, T, V, W, Y
51 -- A, D, G, H, N, S
52 -- H, K, Q, R
53 -- A, C, D, E, F, G, H, I, K, L, M, N, P, Q, R, S, T, V, W, Y
54 -- A, C, H, I, K, L, M, N, P, Q, R, S, T, V
55 -- A, C, E, G, H, K, N, Q, R, S, T
56 -- A, C, D, E, F, G, H, I, K, L, M, N, P, Q, R, S, T, V, W, Y
57 -- A, C, D, E, F, G, H, I, K, L, M, N, P, Q, R, S, T, V, W, Y
58 -- A, C, D, E, F, G, H, I, K, L, M, N, P, Q, R, S, T, V, W, Y
59 -- A, C, D, E, F, G, H, I, K, L, M, N, P, Q, R, S, T, V, W, Y
60 -- A, C, D, E, F, G, H, I, K, L, M, N, P, Q, R, S, T, V, W, Y
61 -- A, D, E, F, G, H, I, K, L, M, N, P, Q, R, S, T, V, W, Y
62 -- A, C, D, E, F, G, H, I, K, L, M, N, P, Q, R, S, T, V, W, Y
63 -- A, C, D, E, F, G, H, I, K, L, M, N, P, Q, R, S, T, V, W, Y
64 -- A, C, D, E, F, G, H, I, K, L, M, N, P, Q, R, S, T, V, W, Y
65 -- A, C, D, E, F, G, H, I, K, L, M, N, P, Q, R, S, T, V, W, Y
66 -- A, C, D, E, F, G, H, I, K, L, M, N, P, Q, R, S, T, V, W, Y
67 -- A, C, D, E, F, G, H, I, K, L, M, N, P, Q, R, S, T, V, W, Y
68 -- A, C, D, E, F, G, H, I, K, L, M, N, P, Q, R, S, T, V, W, Y
69 -- A, C, D, E, F, G, H, I, K, L, M, N, P, Q, R, S, T, V, W, Y
70 -- A, C, D, E, F, G, H, I, K, L, M, N, P, Q, R, S, T, V, W, Y
71 -- A, C, D, E, F, G, H, I, K, L, M, N, P, Q, R, S, T, V, W, Y
72 -- A, C, D, E, F, G, H, I, K, L, M, N, P, Q, R, S, T, V, W, Y
73 -- A, C, D, E, F, G, H, I, K, L, M, N, P, Q, R, S, T, V, W, Y
74 -- A, C, D, E, F, G, H, I, K, L, M, N, P, Q, R, S, T, V, W, Y
75 -- A, C, D, E, F, G, H, I, K, L, M, N, P, Q, R, S, T, V, W, Y
76 -- A, C, D, E, F, G, H, I, K, L, M, N, P, Q, R, S, T, V, W, Y
77 -- A, C, D, E, F, G, H, I, K, L, M, N, P, Q, R, S, T, V, W, Y
78 -- A, C, D, E, F, G, H, I, K, L, M, N, P, Q, R, S, T, V, W, Y
79 -- A, C, D, E, F, G, H, I, K, L, M, N, P, Q, R, S, T, V, W, Y
80 -- A, C, D, E, F, G, H, I, K, L, M, N, P, Q, R, S, T, V, W, Y
81 -- A, C, D, E, F, G, H, I, K, L, M, N, P, Q, R, S, T, V, W, Y
82 -- A, C, D, E, F, G, H, I, K, L, M, N, P, Q, R, S, T, V, W, Y
83 -- A, C, D, E, F, G, H, I, K, L, M, N, P, Q, R, S, T, V, W, Y
84 -- A, C, D, E, F, G, H, I, K, L, M, N, P, Q, R, S, T, V, W, Y
85 -- A, C, D, E, F, G, H, I, K, L, M, N, P, Q, R, S, T, V, W, Y
AHB2 (SEQ ID NO: 101-102 and 164)
  1 -- C, G, A, V, F, Y, W, S, Q, D, E, R, K
  2 -- C, P, G, V, I, M, L, F, Y,W, S, N, Q, D, E, R, H
  3 -- C, G, A,V, I, F, S, T, D, E, K
  4 -- C, P, G, A,V, I, M, L, F, Y, W, S, T, N, Q, D, E, R, K, H
  5 -- C, P, G, A, V, M, L, Y, W, S, N, Q, D, E, R, K, H
  6 -- G, A, V, I, F, S, T, D, H
  7 -- C, P, G,V, I, M, L, F, W, S, T, N, Q, E, R, K, H
  8 -- C, P, G, A, V, M, L, Y, W, S, T, N, Q, D, E, R, K, H
  9 -- C, P, G, A,V, I, M, L, F, W, S, T, N, Q, D, E, R, K, H
10 -- C, P, G, A, V, I, L, Y, W, S, T, N, E, R, K
11 -- C, P, G, A, V, I, M, L, F, Y, W, S, T, N, Q, D, E, R, H
12 -- C, P, G, A, V, I, L, F, Y, W, S, T, N, Q, D, E, R, K, H
13 -- C, G, A, V, M, L, F, W, S, T, N, E, H
14 -- C, P, G, A, V, I, Y, S, T, N, D, E, R, H
15 -- C, G, A, V, I, M, L, F, Y, W, S, T, N, Q, D, E, R, K
16 -- C, P, G, A, V, I, M, L, F, Y, W, S, T, N, Q, D, E, R, K, H
17 -- C, P, G, A, V, L, Y, W, S, T, Q, D, E, R
18 -- C, P, A, V, I, M, F, Y, N, Q, R, K, H
19 -- C, P, G, A, V, I, M, L, F, Y, W, S, T, N, Q, D, E, R, K, H
20 -- C, P, G, A, V, M, L, Y, W, N, Q, E, R, K, H
21 -- C, P, G, A, V, I, M, L, F, Y, W, S, N, Q, E, R, K, H
22 -- C, P, G, A, V, M, L, F, Y, S, T, N, Q, D, E, R, K, H
23 -- C, P, G, A, V, I, M, L, F, Y, W, S, T, N, Q, E, R, K
24 -- C, P, G, A, V, I, M, L, F, Y, W, S, Q, E, R, H
25 -- C, P, G, A, V, I, M, L, F, Y, W, S, T, N, Q, D, R, H
26 -- C, G, A, V, L, Y, S, N, D, R, K, H
27 -- C, P, G, A, V, I, M, L, F, Y, W, S, T, N, Q, D, E, R, K, H
28 -- C, P, G, A, V, I, M, L, F, Y, W, S, T, N, Q, D, E, R, K, H
29 -- C, P, G, V, I, M, L, F, Y, W, S, T, N, Q, D, R, K, H
30 -- C, P, G, A, V, I, M, L, F, Y, W, S, T, N, Q, D, E, R, K, H
31 -- C, G, A,V, I, M, L, F, Y, W, S, T, Q, D, E, R, K, H
32 -- P, G, A, V, I, L, W, S, T, D, R, H
33 -- C, P, G, A,V, I, M, L, F, Y, W, S, T, N, Q, E, R, K, H
34 -- C, G, A, V, I, M, L, F, Y, W, S, T, N, Q, D, E, R, K, H
35 -- C, P, G, A, V, I, M, L, F, Y, W, S, T, N, Q, D, E, R, K, H
36 -- C, P, G, A, V, I, L, F, Y, S, T, N, Q, D, E, R, H
37 -- C, G, A, V, I, M, L, F, Y, W, S, T, N, Q, D, E, R, K, H
38 -- C, P, G, A, V, I, M, L, F, Y, W, S, T, Q, E, R, K
39 -- C, P, G, A, V, I, W, S, Q, E, R, H
40 -- C, P, G, A, V, I, L, Y, W, S, T, N, D, E, R, K, H
41 -- C, P, G, A, V, I, M, L, Y, W, S, T, N, Q, D, E, R, K, H
42 -- C, P, G, A, V, M, L, Y, W, S, T, N, Q, D, E, R, K, H
43 -- C, G, A, V, I, M, L, F, Y, W, S, T, N, Q, D, E, R, K, H
44 -- C, P, G, A, V, I, M, L, F, W, S, T, Q, D, E, R, H
45 -- C, G, A, V, I, M, L, F, Y, W, S, T, N, Q, D, E, R, K, H
46 -- C, P, G, A, V, I, M, L, F, S, T, Q, E, R, K
47 -- C, G, A, V, I, M, L, F, W, S, T, N, Q, D, E, R, H
48 -- C, P, G, A, V, I, M, L, F, Y, W, S, N, Q, E, R, K
49 -- C, P, G, A, V, M, L, F, Y, W, S, T, N, Q, D, E, R, K, H
50 -- C, P, G, A, V, I, M, L, F, Y, W, S, T, N, Q, D, E, R, K, H
51 -- C, G, A, V, I, M, L, F, Y, W, S, T, N, Q, D, E, R, K, H
52 -- C, P, G, A, V, I, M, L, F, Y, W, S, T, N, Q, D, E, R, K, H
53 -- C, P, G, A, V, I, M, L, F, Y, W, S, T, N, D, E, R, K, H
54 -- C, P, G, A, V, I, M, L, F, Y, W, S, T, N, Q, D, E, R, K, H
55 -- C, P, G, A, V, I, M, L, F, Y, S, T, N, Q, D, E, R, K, H
56 -- C, P, G, A, V, I, M, L, F, Y, W, S, T, N, Q, D, E, R, K, H
57 -- C, P, G, A, V, I, M, L, F, Y, W, S, T, N, Q, D, E, R, K, H
58 -- C, G, A, V, I, M, L, F, Y, W, S, T, N, E, R, K, H
59 -- C, P, G, A, V, I, M, L, F, Y, W, S, T, N, Q, D, E, R, K, H
60 -- C, G, A, V, I, M, L, F, Y, W, S, T, Q, D, E, R, K
61 -- C, P, G, A, V, I, M, L, F, Y, W, S, N, Q, D, E, R, K, H
62 -- C, G, A, V, L, S, T, N, D, E, K, H
63 -- C, P, G, A, V, I, L, F, Y, W, S, T, N, Q, D, E, R, K, H
64 -- C, P, G, A, V, I, M, L, F, Y, W, S, T, N, Q, D, E, R, H
65 -- C, G, A, V, I, M, L, F, Y, S, T, N, R, K, H
66 -- C, P, G, A, V, I, M, L, W, T, Q, E, R
67 -- C, P, G, A, V, I, M, L, F, Y, W, S, T, N, Q, D, E, R, K, H
68 -- C, P, G, A, V, I, L, F, Y, W, S, T, N, Q, D, E, R, H
69 -- P, G, V, I, M, L, Y, W, S, T, Q, R, K
70 -- C, P, G, A, V, I, M, L, F, Y, W, S, T, N, Q, D, E, R, K, H
71 -- C, G, A, V, L, F, W, S, Q, D, E, R, K
72 -- C, V, I, L, S
73 -- P, G, A, V, S, T, E
74 -- C, A, L, F , Y, S, T, R, H
75 -- C, P, G,V, I, L, F, W, S, N, D, E, R, K
```

[0045] The residue numbers of the interface residues which are within 8A to the RBD target are listed in Table 2 for the various design types. In another embodiment, amino acid residues at the interface residues listed in Table 2 are either identical at that residue to the reference sequence, or may be substituted by a conservative amino acid substitution. Such conservative amino acid substitutions involve replacing a residue by a residue having similar physiochemical characteristics, e.g., substituting one aliphatic residue for another (such as Ile, Val, Leu, or Ala for one another), or substitution of one polar residue for another (such as between Lys and Arg; Glu and Asp; or Gln and Asn). Other such conservative substitutions, e.g., substitutions of entire regions having similar hydrophobicity characteristics, are known. Amino acids can be grouped according to similarities in the properties of their side chains (in A. L. Lehninger, in Biochemistry, second ed., pp. 73-75, Worth Publishers, New York (1975)): (1) non-polar: Ala (A), Val (V), Leu (L), Ile (I), Pro (P), Phe (F), Trp (W), Met (M); (2) uncharged polar: Gly (G), Ser (S), Thr (T), Cys (C), Tyr (Y), Asn (N), Gln (Q); (3) acidic: Asp (D), Glu (E); (4) basic: Lys (K), Arg (R), His (H). Alternatively, naturally occurring residues can be divided into groups based on common side-chain properties: (1) hydrophobic: Norleucine, Met, Ala, Val, Leu, Ile; (2) neutral hydrophilic: Cys, Ser, Thr, Asn, Gln; (3) 35 acidic: Asp, Glu; (4) basic: His, Lys, Arg; (5) residues that influence chain orientation: Gly, Pro; (6) aromatic: Trp, Tyr, Phe. Non-conservative substitutions will entail exchanging a member of one of these classes for another class. Particular conservative substitutions include, for example; Ala into Gly or into Ser; Arg into Lys; Asn into Gln or into His; Asp into Glu; Cys into Ser; Gln into Asn; Glu into Asp; Gly into Ala or into Pro; His into Asn or into Gln; Ile into Leu or into Val; Leu into Ile or into Val; Lys into Arg, into Gln or into Glu; Met into Leu, into Tyr or into Ile; Phe into Met, into Leu or into Tyr; Ser into Thr; Thr into Ser; Trp into Tyr; Tyr into Trp; and/or Phe into Val, into Ile or into Leu.

TABLE 2
Interface residues

| | |
|---|---|
| ‘LCB1’: | [3, 6, 7, 10, 13, 17, 20, 22, 23, 25, 26, 29, 32, 33, 36], |
| ‘LCB2’: | [1, 2, 5, 6, 9, 12, 13, 16, 20, 32, 35, 39], |
| ‘LCB3’: | [1, 3, 4, 6, 7, 10, 11, 13, 14, 15, 18, 27, 30, 33, 34, 37], |
| ‘LCB4’: | [8, 11, 12, 15, 23, 24, 26, 27, 28, 30, 31, 34, 56], |
| ‘LCB5’: | [35, 37, 38, 40, 41, 44, 47, 48, 53, 56, 60, 63], |
| ‘LCB6’: | [3, 4, 7, 8, 11, 12, 14, 15, 21, 24, 25, 28, 31, 32, 35], |
| ‘LCB7’: | [2, 3, 6, 7, 9, 10, 13, 17, 29, 32, 33, 36], |
| ‘LCB8’: | [14, 15, 16, 19, 22, 23, 26, 29, 30, 38, 41, 42, 45], |
| ‘AHB1’, | [34, 38, 41, 45, 48, 49, 52, 63, 64, 67, 68, 70, 71, 74, 78, |
| | 81, 82, 85], |
| ‘AHB2’, | [4, 7, 11, 14, 15, 18, 21, 26, 29, 30, 33, 34, 36, 37, 40, 43, |
| | 44, 47, 48]. |

[0046] In one embodiment, amino acid residues at the interface residues listed in Table 2 are identical at that residue to the reference sequence.

[0047] In another embodiment, the polypeptide comprises an amino acid sequence at least 50%, 55%, 60%, 65%, 70%, 75%, 80%, 85%, 90%, 91%, 92%, 93%, 94%, 95%, 96%, 97%, 98%, 99%, or 100% identical to the amino acid sequence selected from the group consisting of SEQ ID NOS:1-10, 13-17, 19-21, 33-34, and 100-101.

[0048] In one embodiment, the polypeptides comprise an amino acid sequence at least 50%, 55%, 60%, 65%, 70%, 75%, 80%, 85%, 90%, 91%, 92%, 93%, 94%, 95%, 96%, 97%, 98%, 99%, or 100% identical to the amino acid sequence selected from the group consisting of SEQ ID NOS:1-10 and 102-136 (see Table 3).

TABLE 3
LCB1 exemplary variants

| Name | Binder Protein |
|---|---|
| LCB1_4N | DKENILQKIYEIMRLLDELGHAEASMRVSDLIYEFMKKGDERLLEEAERLLEEVER (SEQ |
| | ID NO: 102) |
| LCB1_4K | DKEKILQKIYEIMRLLDELGHAEASMRVSDLIYEFMKKGDERLLEEAERLLEEVER (SEQ |
| | ID NO: 103) |
| LCB1_14K | DKEWILQKIYEIMKLLDELGHAEASMRVSDLIYEFMKKGDERLLEEAERLLEEVER (SEQ |
| | ID NO: 104) |
| LCB1_15T | DKEWILQKIYEIMRTLDELGHAEASMRVSDLIYEFMKKGDERLLEEAERLLEEVER (SEQ |
| | ID NO: 105) |
| LCB1_18Q | DKEWILQKIYEIMRLLDQLGHAEASMRVSDLIYEFMKKGDERLLEEAERLLEEVER (SEQ |
| | ID NO: 106) |
| LCB1_18K | DKEWILQKIYEIMRLLDKLGHAEASMRVSDLIYEFMKKGDERLLEEAERLLEEVER (SEQ |
| | ID NO: 107) |
| LCB1_27Q | DKEWILQKIYEIMRLLDELGHAEASMQVSDLIYEFMKKGDERLLEEAERLLEEVER (SEQ |
| | ID NO: 108) |
| LCB1_27Y | DKEWILQKIYEIMRLLDELGHAEASMYVSDLIYEFMKKGDERLLEEAERLLEEVER (SEQ |
| | ID NO: 109) |
| LCB1_17E | DKEWILQKIYEIMRLLEELGHAEASMRVSDLIYEFMKKGDERLLEEAERLLEEVER (SEQ |
| | ID NO: 110) |
| LCB1_17R | DKEWILQKIYEIMRLLRELGHAEASMRVSDLIYEFMKKGDERLLEEAERLLEEVER (SEQ |
| | ID NO: 111) |
| LCB1_42N | DKEWILQKIYEIMRLLDELGHAEASMRVSDLIYEFMKKGDENLLEEAERLLEEVER (SEQ |
| | ID NO: 112) |
| LCB1_49Q | DKEWILQKIYEIMRLLDELGHAEASMRVSDLIYEFMKKGDERLLEEAEQLLEEVER (SEQ |
| | ID NO: 113) |
| LCB1_52Q | DKEWILQKIYEIMRLLDELGHAEASMRVSDLIYEFMKKGDERLLEEAERLLQEVER (SEQ |
| | ID NO: 114) |
| LCB1_32L | DKEWILQKIYEIMRLLDELGHAEASMRVSDLLYEFMKKGDERLLEEAERLLEEVER (SEQ |
| | ID NO: 115) |
| LCB1_28A | DKEWILQKIYEIMRLLDELGHAEASMRASDLIYEFMKKGDERLLEEAERLLEEVER (SEQ |
| | ID NO: 116) |
| LCB1_v1.3_ACH1 | DKENILQKIYEIMKTLEQLGHAEASMYVSDLIYEFMKQGDERLLEEAERLLEEVER (SEQ |
| | ID NO: 117) |
| LCB1_v1.3_ACH2 | DKENILQKIYEIMKTLEQLGHAEASMQVSDLIYEFMKQGDENLLEEAERLLEEVER (SEQ |
| | ID NO: 118) |
| LCB1_v1.3_ACH3 | DKENILQKIYEIMKTLEQLGHAEASMQVSDLIYEFMKQGDERLLEEAEQLLEEVER (SEQ |
| | ID NO: 119) |
| LCB1_v1.3_ACH4 | DKENILQKIYEIMKTLEQLGHAEASMYVSDLIYEFMKQGDENLLEEAEQLLEEVER (SEQ |
| | ID NO: 120) |
| LCB1_v1.3_ACH5 | DKENILQKIYEIMKTLEQLGHAEASMQVSDLIYEFMKQGDENLLEEAEQLLEEVER (SEQ |
| | ID NO: 121) |
| LCB1_v1.3_1 | DRENILQKIYEIMKELEKLGHAEASMQVSDLIYEFMQDKDERLLEEAERLLEEVKR (SEQ |
| | ID NO: 122) |
| LCB1_v1.3_2 | DRENILQKIYEIMKELRQLGHAEASMQVSDLIYEFMKTKDKRLLEEAERLLEEVKR (SEQ |
| | ID NO: 123) |
| LCB1_v1.3_3 | DRENILQKIYEIMKTLRRLGHAEASMQVSDLIYEFMQDKDKRLLEEAERLLEEVQR (SEQ |
| | ID NO: 124) |
| LCB1_v1.3_4 | DKENVLQKIYEIMKELERLGHAEASMQVSDLIYEFMKTKDERLLEEAERLLEEVKR (SEQ |
| | ID NO: 125) |
| LCB1_v1.3_5 | DRENILQKIYEIMKTLEKLGHAEASMQASDLIYEFMKTKDERLLEEAERLLEEVQR (SEQ |
| | ID NO: 126) |
| LCB1_v1.3_6 | DKENILQKIYEIMKTLRALGHAEASMQVSDLIYEFMQTKDERLLEEAERLLEEVKR (SEQ |
| | ID NO: 127) |
| LCB1_v1.3_7 | DKENVLQKIYEIMKTLEKLGHAEASMQVSDLIYEFMQTKDKRLLEEAERLLEEVQR (SEQ |
| | ID NO: 128) |
| LCB1_v1.3_15 | DRENILQKIYEIMKELEKLGHAEASMQVSDLIYEFMQDKDENLLEEAERLLEEVKR (SEQ |
| | ID NO: 129) |
| LCB1_v1.3_16 | DRENILQKIYEIMKELRQLGHAEASMQVSDLIYEFMKTKDKNLLEEAERLLEEVKR (SEQ |
| | ID NO: 130) |
| LCB1_v1.3_17 | DRENILQKIYEIMKTLRRLGHAEASMQVSDLIYEFMQDKDKNLLEEAERLLEEVQR (SEQ |
| | ID NO: 131) |
| LCB1_v1.3_19 | DRENILQKIYEIMKTLEKLGHAEASMQASDLIYEFMKTKDENLLEEAERLLEEVQR (SEQ |
| | ID NO: 132) |
| LCB1_v1.3_20 | DKENILQKIYEIMKTLRALGHAEASMQVSDLIYEFMQTKDENLLEEAERLLEEVKR (SEQ |
| | ID NO: 133) |
| LCB1_v1.3_21 | DKENVLQKIYEIMKTLEKLGHAEASMQVSDLIYEFMQTKDKNLLEEAERLLEEVQR (SEQ |
| | ID NO: 134) |
| LCB1_v2.2 | DKENVLQKIYEIMKELERLGHAEASMQVSDLIYEFMKTKDENLLEEAERLLEEVKR (SEQ |
| | ID NO: 135) |
| LCB1_v2.2_ | DKENVLQKIYEIMKELERLGHAEASMQVSDLIYEFMKTKDENLLEEAERLLEEVTR (SEQ |
| ompT | ID NO: 136) |

[0049] The polypeptides may contain a substantial number of mutations while retaining binding activity, as detailed in the examples that follow. In one embodiment, the polypeptide comprises an amino acid substitution relative to the amino acid sequence of SEQ ID NO:1 at 1, 2, 3, 4, 5, 6, 7, 8, 9, 10, 11, 12, 13, 14, 15, 16, 17, or all 18 residues selected from the group consisting of 2, 4, 5, 14, 15, 17, 18, 27, 28, 32, 37, 38, 39, 41, 42, 49, 52, and 55. In another embodiment, the substitutions are selected from the substitutions listed in Table 4, either individually (i.e.: any single mutation listed in the Table) or in combinations in a given row.

TABLE 4
Exemplary LCB1 substitutions

| Name | Parent | Mutations from WT | | | | | | | | | |
|---|---|---|---|---|---|---|---|---|---|---|---|
| LCB1_1 | LCB1 | W4N | R14K | L15T | E18Q | R27Q | K38Q | | | | |
| LCB1_2 | LCB1 | W4N | R14K | L15T | E18Q | R27Y | K38Q | | | | |
| LCB1_3 | LCB1 | W4N | R14K | L15T | D17E | E18Q | R27Q | K38Q | | | |
| LCB1_4 | LCB1 | W4N | R14K | L15T | D17E | E18Q | R27Q | K38Q | R42N | R49Q | E529 |
| LCB1_4N | LCB1 | W4N | | | | | | | | | |
| LCB1_4K | LCB1 | W4K | | | | | | | | | |
| LCB1_14K | LCB1 | R14K | | | | | | | | | |
| LCB1_15T | LCB1 | L15T | | | | | | | | | |
| LCB1_18Q | LCB1 | E18Q | | | | | | | | | |
| LCB1_18K | LCB1 | E18K | | | | | | | | | |
| LCB1_27Q | LCB1 | R27Q | | | | | | | | | |
| LCB1_27Y | LCB1 | R27Y | | | | | | | | | |
| LCB1_38Q | LCB1 | K38Q | | | | | | | | | |
| LCB1_17E | LCB1 | D17E | | | | | | | | | |
| LCB1_17R | LCB1 | D17R | | | | | | | | | |
| LCB1_42N | LCB1 | R42N | | | | | | | | | |
| LCB1_49Q | LCB1 | R49Q | | | | | | | | | |
| LCB1_52Q | LCB1 | E52Q | | | | | | | | | |
| LCB1_32L | LCB1 | I32L | | | | | | | | | |
| LCB1_28A | LCB1 | V28A | | | | | | | | | |
| LCB1_v1.3 | LCB1 | W4N | R14K | L15T | D17E | E18Q | R27Q | K38Q | | | |
| LCB1_v1.3_ACH1 | LCB1_v1.3 | W4N | R14K | L15T | D17E | E18Q | R27Y | K38Q | | | |
| LCB1_v1.3_ACH2 | LCB1_v1.3 | W4N | R14K | L15T | D17E | E18Q | R27Q | K38Q | R42N | | |
| LCB1_v1.3_ACH3 | LCB1_v1.3 | W4N | R14K | L15T | D17E | E18Q | R27Q | K38Q | R49Q | | |
| LCB1_v1.3_ACH4 | LCB1_v1.3 | W4N | R14K | L15T | D17E | E18Q | R27Y | K38Q | R42N | R49Q | |
| LCB1_v1.3_ACH5 | LCB1_v1.3 | W4N | R14K | L15T | D17E | E18Q | R27Q | K38Q | R42N | R49Q | |
| LCB1_v1.3_1 | LCB1_v1.3 | K2R | W4N | R14K | L15E | D17E | E18K | R27Q | K37Q | K38D | G39K |
| | E55K | | | | | | | | | | |
| LCB1_v1.3_2 | LCB1_v1.3 | K2R | W4N | R14K | L15E | D17R | E18Q | R27Q | K38T | G39K | E41K |
| | E55K | | | | | | | | | | |
| LCB1_v1.3_3 | LCB1_v1.3 | K2R | W4N | R14K | L15T | D17R | E18R | R27Q | K37Q | K38D | G39K |
| | E41K | E55Q | | | | | | | | | |
| LCB1_v1.3_4 | LCB1_v1.3 | W4N | I5V | R14K | L15E | D17E | E18R | R27Q | K38T | G39K | E55K |
| LCB1_v1.3_5 | LCB1_v1.3 | K2R | W4N | R14K | L15T | D17E | E18K | R27Q | V28A | K38T | G39K |
| | E55Q | | | | | | | | | | |
| LCB1_v1.3_6 | LCB1_v1.3 | W4N | R14K | L15T | D17R | E18A | R27Q | K37Q | K38T | G39K | E55K |
| LCB1_v1.3_7 | LCB1_v1.3 | W4N | I5V | R14K | L15T | D17E | E18K | R27Q | K37Q | K38T | G39K |
| | E41K | E55Q | | | | | | | | | |
| LCB1_v1.3_15 | LCB1_v1.3 | K2R | W4N | R14K | L15E | D17E | E18K | R27Q | K37Q | K38D | G39K |
| | R42N | E55K | | | | | | | | | |
| LCB1_v1.3_16 | LCB1_v1.3 | K2R | W4N | R14K | L15E | D17R | E18Q | R27Q | K38T | G39K | E41K |
| | R42N | E55K | | | | | | | | | |
| LCB1_v1.3_17 | LCB1_v1.3 | K2R | W4N | R14K | L15T | D17R | E18R | R27Q | K37Q | K38D | G39K |
| | E41K | R42N | E55Q | | | | | | | | |
| LCB1_v1.3_19 | LCB1_v1.3 | K2R | W4N | R14K | L15T | D17E | E18K | R27Q | V28A | K38T | G39K |
| | R42N | E55Q | | | | | | | | | |
| LCB1_v1.3_20 | LCB1_v1.3 | W4N | R14K | L15T | D17R | E18A | R27Q | K37Q | K38T | G39K | R42N |
| | E55K | | | | | | | | | | |
| LCB1_v1.3_21 | LCB1_v1.3 | W4N | I5V | R14K | L15T | D17E | E18K | R27Q | K37Q | K38T | G39K |
| | E41K | R42N | E55Q | | | | | | | | |
| LCB1_v2.2 | LCB1_v1.3 | W4N | I5V | R14K | L15E | D17E | E18R | R27Q | K38T | G39K | R42N |
| | E55K | | | | | | | | | | |
| LCB1_v2.2_ompT | LCB1-v1.3 | W4N | I5V | R14K | L15E | D17E | E18R | R27Q | K38T | G39K | R42N |
| | E55T | | | | | | | | | | |

[0050] In another embodiment, the polypeptides comprise an amino acid sequence at least 50%, 55%, 60%, 65%, 70%, 75%, 80%, 85%, 90%, 91%, 92%, 93%, 94%, 95%, 96%, 97%, 98%, 99%, or 100% identical to the amino acid sequence selected from the group consisting of SEQ ID NOS: 13-17, 19-21 and 137-163 (see Table 5).

TABLE 5
LCB3 exemplary variants

| Name | Binder Protein |
|---|---|
| LCB3_8Q | NDDELHMQMTDLVYEALHFAKDEEIKKRVFQLFELADKAYKNNDRQKLEKVVEELKELLE |
| | RLLS (SEQ ID NO: 137) |
| LCB3_8T | NDDELHMTMTDLVYEALHFAKDEEIKKRVFQLFELADKAYKNNDRQKLEKVVEELKELLE |
| | RLLS (SEQ ID NO: 138) |
| LCB3_19K | NDDELHMLMTDLVYEALHKAKDEEIKKRVFQLFELADKAYKNNDRQKLEKVVEELKELLE |
| | RLLS (SEQ ID NO: 139) |
| LCB3_19I | NDDELHMLMTDLVYEALHIAKDEEIKKRVFQLFELADKAYKNNDRQKLEKVVEELKELLE |
| | RLLS (SEQ ID NO: 140) |
| LCB3_25F | NDDELHMLMTDLVYEALHFAKDEEFKKRVFQLFELADKAYKNNDRQKLEKVVEELKELLE |
| | RLLS (SEQ ID NO: 141) |
| LCB3_25M | NDDELHMLMTDLVYEALHFAKDEEMKKRVFQLFELADKAYKNNDRQKLEKVVEELKELLE |
| | RLLS (SEQ ID NO: 142) |
| LCB3_26Q | NDDELHMLMTDLVYEALHFAKDEEIQKRVFQLFELADKAYKNNDRQKLEKVVEELKELLE |
| | RLLS (SEQ ID NO: 143) |
| LCB3_28H | NDDELHMLMTDLVYEALHFAKDEEIKKHVFQLFELADKAYKNNDRQKLEKVVEELKELLE |
| | RLLS (SEQ ID NO: 144) |
| LCB3_35K | NDDELHMLMTDLVYEALHFAKDEEIKKRVFQLFEKADKAYKNNDRQKLEKVVEELKELLE |
| | RLLS (SEQ ID NO: 145) |
| LCB3_37T | NDDELHMLMTDLVYEALHFAKDEEIKKRVFQLFELATKAYKNNDRQKLEKVVEELKELLE |
| | RLLS (SEQ ID NO: 146) |
| LCB3_40R | NDDELHMLMTDLVYEALHFAKDEEIKKRVFQLFELADKARKNNDRQKLEKVVEELKELLE |
| | RLLS (SEQ ID NO: 147) |
| LCB3_43K | NDDELHMLMTDLVYEALHFAKDEEIKKRVFQLFELADKAYKNKDRQKLEKVVEELKELLE |
| | RLLS (SEQ ID NO: 148) |
| LCB3_34G | NDDELHMLMTDLVYEALHFAKDEEIKKRVFQLFGLADKAYKNNDRQKLEKVVEELKELLE |
| | RLLS (SEQ ID NO: 149) |
| LCB3_34Y | NDDELHMLMTDLVYEALHFAKDEEIKKRVFQLFYLADKAYKNNDRQKLEKVVEELKELLE |
| | RLLS (SEQ ID NO: 150) |
| LCB3_34T | NDDELHMLMTDLVYEALHFAKDEEIKKRVFQLFTLADKAYKNNDRQKLEKVVEELKELLE |
| | RLLS (SEQ ID NO: 151) |
| LCB3_49K | NDDELHMLMTDLVYEALHFAKDEEIKKRVFQLFELADKAYKNNDRQKLKKVVEELKELLE |
| | RLLS (SEQ ID NO: 152) |
| LCB3_v1.2_AC | NDDELHMQMTDLVYEALHFAKDEEIQKHVFQLFGKATKAYKNKDRQKLEKVVEELKELLE |
| H1 | RLLS (SEQ ID NO: 153) |
| LCB3_v1.2_AC | NDDELHMQMTDLVYEALHFAKDEEIQKHVFQLFYKATKAYKNKDRQKLEKVVEELKELLE |
| H2 | RLLS (SEQ ID NO: 154) |
| LCB3_v2.2 | NLDELHMQMTDLVYEALHFAKDEEFQKHVFQLFEKATKAYKNKDRQKLEKVVEELKELLE |
| | RLLS (SEQ ID NO: 155) |
| LCB3_v1.3_2 | NDDELHMQMTDLVYEALHFAKTEEFQKHVFQLFEKATKAYKNKDRQKLEKVVEELKELLE |
| | RLLS (SEQ ID NO: 156) |
| LCB3_v1.3_3 | NDDELHMQMTDLVYEALHFAKDEEFQKHVFQLFEKARKAYKNKDRQKLEKVVEELKELLE |
| | RLLS (SEQ ID NO: 157) |
| LCB3_v1.3_4 | NDDELHMQMTDLVWEALHFAKDEEFQKHVFQLFEKARKAYKNKDRQKLEKVVEELKELLE |
| | RLLS (SEQ ID NO: 158) |
| LCB3_v1.3_5 | NDDELHMQMTDLVWEALHFAKDEEFQKHVFQLFEKATKAYKNKDRQKLEKVVEELKELLE |
| | RLLS (SEQ ID NO: 159) |
| LCB3_v1.3_6 | NEDELHMQMTDLVWEALHFAKDEEFQKHVFQLFEKATKAYKNKDRQKLEKVVEELKELLE |
| | RLLS (SEQ ID NO: 160) |
| LCB3_v1.3_7 | NDDELHMQMTDLVWEALHFAKTEEFQKHVFQLFEKATKAYKNKDRQKLEKVVEELKELLE |
| | RLLS (SEQ ID NO: 161) |
| LCB3_v1.3_15 | NLDELHMQMTDLVYEALHFAKTEEFQKHVFQLFEKATKAYKNKDRQKLEKVVEELKELLE |
| | RLLS (SEQ ID NO: 162) |
| LCB3_v2.3 | NIDELLMQVTDLIYEALHFAKDEEFQKHAFQLFEKATKAYKNKDKQKLEKVVEELKELLE |
| | RILS (SEQ ID NO: 163) |

[0051] The polypeptides may contain a substantial number of mutations while retaining binding activity, as detailed in the examples that follow. In one embodiment, the polypeptide comprises an amino acid substitution relative to the amino acid sequence of SEQ ID NO:13 at 1, 2, 3, 4, 5, 6, 7, 8, 9, 10, 11, 12, 13, 14, 15, 16, 17, 18, 19, or all 20 residues selected from the group consisting 2, 6, 8, 9, 13, 14, 19, 22, 25, 26, 28, 29, 34, 35, 37, 40, 43, 45, 49, and 62. In another embodiment, the substitutions are selected from the substitutions listed in Table 6, either individually or in combinations in a given row.

TABLE 6
Exemplary LCB3 substitutions

| Name | Parent | Mutations from WT | | | | | | | |
|---|---|---|---|---|---|---|---|---|---|
| LCB3_1 | LCB3 | L8Q | I25F | K26Q | R28H | L35K | D37T | | |
| LCB3_2 | LCB3 | L8Q | K26Q | R28H | L35K | D37T | N43K | | |
| LCB3_3 | LCB3 | L8Q | I25F | K26Q | R28H | L35K | D37T | N43K | |
| LCB3_4 | LCB3 | L8Q | F19K | I25F | K26Q | R28H | L35K | D37T | Y40R, |
| | | | | | | | | | N43K |
| LCB3_8Q | LCB3 | L8Q | | | | | | | |
| LCB3_8T | LCB3 | L8T | | | | | | | |
| LCB3_19K | LCB3 | F19K | | | | | | | |
| LCB3_19I | LCB3 | F19I | | | | | | | |
| LCB3_25F | LCB3 | I25F | | | | | | | |
| LCB3_25M | LCB3 | I25M | | | | | | | |
| LCB3_26Q | LCB3 | K26Q | | | | | | | |
| LCB3_28H | LCB3 | R28H | | | | | | | |
| LCB3_35K | LCB3 | L35K | | | | | | | |
| LCB3_37T | LCB3 | D37T | | | | | | | |
| LCB3_40R | LCB3 | Y40R | | | | | | | |
| LCB3_43K | LCB3 | N43K | | | | | | | |
| LCB3_34G | LCB3 | E34G | | | | | | | |
| LCB3_34Y | LCB3 | E34Y | | | | | | | |
| LCB3_34T | LCB3 | E34T | | | | | | | |
| LCB3_49K | LCB3 | E49K | | | | | | | |
| LCB3_v1.2 | LCB3 | L8Q | K26Q | R28H | L35K | D37T | N43K | | |
| LCB3_v1.2_ACH1 | LCB3_v1.2 | L8Q | K26Q | R28H | E34G | L35K | D37T | N43K | |
| LCB3_v1.2_ACH2 | LCB3_v1.2 | L8Q | K26Q | R28H | E34Y | L35K | D37T | N43K | |
| LCB3_v2.2 | LCB3_v1.3 | D2L | L8Q | I25F | K26Q | R28H | L35K | D37T | N43K |
| LCB3_v1.3_2 | LCB3_v1.3 | L8Q | D22T | I25F | K26Q | R28H | L35K | D37T | N43K |
| LCB3_v1.3_3 | LCB3_v1.3 | L8Q | I25F | K26Q | R28H | L35K | D37R | N43K | |
| LCB3_v1.3_4 | LCB3_v1.3 | L8Q | Y14W | I25F | K26Q | R28H | L35K | D37R | N43K |
| LCB3_v1.3_5 | LCB3_v1.3 | L8Q | Y14W | I25F | K26Q | R28H | L35K | D37T | N43K |
| | | | | | | | | | D37T, |
| LCB3_v1.3_6 | LCB3_v1.3 | D2E | L8Q | Y14W | I25F | K26Q | R28H | L35K | N43K |
| LCB3_v1.3_7 | LCB3_v1.3 | L8Q | Y14W | D22T | I25F | K26Q | R28H | L35K | D37T, |
| | | | | | | | | | N43K |
| LCB3_v1.3 | LCB3_v1.2 | L8Q | I25F | K26Q | R28H | L35K | D37T | N43K | |
| LCB3_v1.3_15 | LCB3_v1.3 | D2L | L8Q | D22T | I25F | K26Q | R28H | L35K | D37T, |
| | | | | | | | | | N43K |
| | | | | | | | | | R28H, |
| LCB3_v2.3 | LCB1_v2.1 | D2I | H6L | L8Q | M9V | V13I | I25F | K26Q | V29A, |
| | | | | | | | | | D37T, |
| | | | | | | | | | N43K, |
| | | | | | | | | | R45K, |
| | | | | | | | | | L62I |
| | | | | | | | | | L35K, |

[0052] In a further embodiment, the polypeptides comprise an amino acid sequence at least 50%, 55%, 60%, 65%, 70%, 75%, 80%, 85%, 90%, 91%, 92%, 93%, 94%, 95%, 96%, 97%, 98%, 99%, or 100% identical to the amino acid sequence selected from the group consisting of SEQ ID NOS:33-34 and 100-101 and 164 (see Table 7). 5

TABLE 7
AHB2 exemplary variant

| | |
|---|---|
| AHB2v2 | ELEEQVMHVLDQVSELAHELLHKLTGEELERAAYFNWWATEMMLELIKSDDEREIREIEEEAARILEH |
| | LEELART (SEQ ID NO: 164) |

[0053] In one embodiment, the polypeptide comprises an amino acid substitution relative to the amino acid sequence of SEQ ID NO: 101 at or both residues selected from the group consisting 63 and 75. In a further embodiment, the substitutions comprise R63A and/or K75T.

[0054] In all embodiments disclosed herein, the polypeptides may comprise one or more additional functional groups or residues as deemed appropriate for an intended use. In one embodiment, the polypeptides may further comprise one or more added cysteine residues at the N-terminus and/or C-terminus. In another embodiment, the polypeptides may further comprise an N-linked glycosylation site (i.e.: NX(S/T), where X is any amino acid).

[0055] In another embodiment, the polypeptides may comprise two or more (i.e.: 2, 3, 4, 5, or more) copies of the amino acid sequence at least 50%, 55%, 60%, 65%, 70%, 75%, 80%, 85%, 90%, 91%, 92%, 93%, 94%, 95%, 96%, 97%, 98%, 99%, or 100% identical to the amino acid sequence selected from the group consisting of SEQ ID NOS: 1-17, 19-21, 23-34 and 100-101. In this embodiment, 2 or more of the binders are linked. In one embodiment, the two or more copies of the polypeptide are all identical; in another embodiment, the two or more copies of the polypeptide are not all identical. In any of these embodiments, the two or more copies of the polypeptide may be separated by amino acid linker sequences, though such linkers are not required. The amino acid linkers may be of any length and amino acid composition as suitable for an intended purpose. In one embodiment, the amino acid linkers are independently between 2-100 or 3-100 amino acids in length.

[0056] In another embodiment, the amino acid linker sequences comprise Gly-Ser rich (at least 90%, 91%, 92%, 93%, 94%, 95%, 96%, 97%, 98%, 99%, or 100% Gly-Ser residues) amino acid linkers. In a further embodiment, the Gly-Ser rich linkers comprise an amino acid sequence selected from the group consisting of GG and SEQ ID NOs:35-46 and 165-171

(SEQ ID NO: 35)
GSGS
(SEQ ID NO: 36)
GGSGGS
(SEQ ID NO: 37)
SGGSGGSGGSG
(SEQ ID NO:38)
GGSGGSGSGGSG
(SEQ ID NO:39)
GGSGSSGGSGSGSG
(SEQ ID NO: 40)
GGSGSGGSGSGSGGS
(SEQ ID NO: 41)
SGGSGSGSGGSGSGS
(SEQ ID NO: 42)
GGGSGGGSSGGSGGSSGGGSGGGS
(SEQ ID NO:43)
GGGSGGGGSGGGGSGGGGSGGGGSGGGGSG
(SEQ ID NO:44)
GGGSGGGSGGSGGSGGGSGGGSGSGGSGGGGSGGGS
(SEQ ID NO: 45)
GGGGSGGGGSGGGGSGGGGSGGGGSGGGGSGGGGSG
GGGSGGGGSGGGGSGGGGSGGGGSGGGGSGGGGSGG
GGS
(SEQ ID NO: 46)
SGGGGSGGGGSGGGGSGGGGSGGGGSGGGGSGGGGS
GGGGSGGGGSGGGGSGGGGSGGGGSGGGGSGGGGSG
GGGS
(SEQ ID NO: 165)
GGSGGGGSGGGGSGGGGSGG
(SEQ ID NO: 166)
GGSGGGGSGGGGSGG
(SEQ ID NO: 167)
GGSGGGGSGG
(SEQ ID NO: 168)
GGGGSGGGG
(SEQ ID NO: 169)
GGGSGGG
(SEQ ID NO: 170)
GGSGG
(SEQ ID NO: 171)
GGSGSSG

[0057] In another embodiment, the amino acid linker sequences may comprise Pro-rich (at least 15%, 20%, 25%, or greater Pro residues) amino acid linkers. Non-limiting and exemplary embodiments may comprise an amino acid sequence selected from the group consisting of SEQ ID NOs:97-98 and 172-176.

(SEQ ID NO: 97)
AGSGGSGGSGGSPVPSTPPTPSPSTPPTPSPSPVPSTP
PTPSPSTPPTPSPSPVPSTPPTPSPSTPPTPSPSASG
(SEQ ID NO: 98)
GSGGSGGSGGSPVPSTPPTPSPSTPPTPSPSGGSGNSS
GSGGSPVPSTPPTPSPSTPPTPSPSAS
(SEQ ID NO: 172)
GGASPAAPAPASPAAPAPSAPAGG
(SEQ ID NO: 173)
GGASPAAPAPASPAGG
(SEQ ID NO: 174)
GGASPAAPAPGG
(SEQ ID NO: 175)
GGASPAAPAGG
(SEQ ID NO: 176)
GGSSGPSTPPTPSPSTPPTPSPSPGGSSG

[0058] In further non-limiting embodiments, the amino acid linkers may comprise the amino acid sequence selected from the group consisting of SEQ ID NOS: 99 and 177-178.

(SEQ ID NO: 177)
GGSSAGSPTSTGTSSATPSGSGTGG
(SEQ ID NO: 178)
GGSSGEAAAKEAAAKEAAAKGSSGG
(SEQ ID NO: 99)
GGSSGQIFVKTLTGKTITLEVEPSDTIENVKAKIQDKEGIPPDQ
QRLIFAGKQLEDGRTLSDYNIQKESTLHLVL
RLRGGGGSSG

[0059] In one embodiment, the polypeptide comprises the formula Z1-Z2-Z3, wherein:

[0060] Z1 comprises an amino acid sequence at least 50%, 55%, 60%, 65%, 70%, 75%, 80%, 85%, 90%, 91%, 92%, 93%, 94%, 95%, 96%, 97%, 98%, 99%, or 100% identical to the amino acid sequence selected from the group consisting of SEQ ID NOS: 1-17, 19-21, 23-34 and 100-164;

[0061] Z2 comprises an optional amino acid linker; and

[0062] Z3 comprises an amino acid sequence at least 50%, 55%, 60%, 65%, 70%, 75%, 80%, 85%, 90%, 91%, 92%, 93%, 94%, 95%, 96%, 97%, 98%, 99%, or 100% identical to the amino acid sequence selected from the group consisting of SEQ ID NOS: 1-17, 19-21, 23-34 and 100-164;

[0063] wherein Z1 and Z3 may be identical or different. In one embodiment, Z1 and Z3 are identical; in another embodiment Z1 and Z3 are different. In embodiments where Z1 and Z3 differ, each may be a variant of a given starting monomer (ex: Z1 comprises the amino acid sequence of SEQ ID NO:1 (LCB1), and Z3 comprises the amino acid sequence of SEQ ID NO: 102-136. Any such combination of the monomers disclosed herein may be used. It will further be understood that the polypeptides may comprise 2, 3, 4, 5, or more monomers of any embodiment disclosed herein. In embodiments where there are 3 or more monomers, all 3 monomers may be identical; 2 monomers may be identical and one may differ, or all 3 monomers may be different.

[0064] In one embodiment employing LCB1 and variants thereof, Z1 comprises an amino acid sequence at least 50%, 55%, 60%, 65%, 70%, 75%, 80%, 85%, 90%, 91%, 92%, 93%, 94%, 95%, 96%, 97%, 98%, 99%, or 100% identical to the amino acid sequence selected from the group consisting of SEQ ID NOS: 1-10 and 102-136; and

[0065] Z3 comprises an amino acid sequence at least 50%, 55%, 60%, 65%, 70%, 75%, 80%, 85%, 90%, 91%, 92%, 93%, 94%, 95%, 96%, 97%, 98%, 99%, or 100% identical to the amino acid sequence selected from the group consisting of SEQ ID NOS: 1-10 and 102-136.

[0066] In another embodiment employing LCB3 and variants thereof,

[0067] Z1 comprises an amino acid sequence at least 50%, 55%, 60%, 65%, 70%, 75%, 80%, 85%, 90%, 91%, 92%, 93%, 94%, 95%, 96%, 97%, 98%, 99%, or 100% identical to the amino acid sequence selected from the group consisting of SEQ ID NOS: 13-17, 19-21 and 137-163; and

[0068] Z3 comprises an amino acid sequence at least 50%, 55%, 60%, 65%, 70%, 75%, 80%, 85%, 90%, 91%, 92%, 93%, 94%, 95%, 96%, 97%, 98%, 99%, or 100% identical to the amino acid sequence selected from the group consisting of SEQ ID NOS: 13-17, 19-21 and 137-163.

[0069] In another embodiment employing AHB and variants thereof,

[0070] Z1 comprises an amino acid sequence at least 50%, 55%, 60%, 65%, 70%, 75%, 80%, 85%, 90%, 91%, 92%, 93%, 94%, 95%, 96%, 97%, 98%, 99%, or 100% identical to the amino acid sequence selected from the group consisting of SEQ ID NOS: 33-34, 100-101, and 164; and

[0071] Z3 comprises an amino acid sequence at least 50%, 55%, 60%, 65%, 70%, 75%, 80%, 85%, 90%, 91%, 92%, 93%, 94%, 95%, 96%, 97%, 98%, 99%, or 100% identical to the amino acid sequence selected from the group consisting of SEQ ID NOS: 33-34, 100-101, and 164.

[0072] In one embodiment, one of Z1 and Z3 comprises an amino acid sequence at least 50%, 55%, 60%, 65%, 70%, 75%, 80%, 85%, 90%, 91%, 92%, 93%, 94%, 95%, 96%, 97%, 98%, 99%, or 100% identical to the amino acid sequence selected from the group consisting of SEQ ID NOS: 1-10 and 102-136; and

[0073] the other of Z1 and Z3 comprises an amino acid sequence at least 50%, 55%, 60%, 65%, 70%, 75%, 80%, 85%, 90%, 91%, 92%, 93%, 94%, 95%, 96%, 97%, 98%, 99%, or 100% identical to the amino acid sequence selected from the group consisting of SEQ ID NOS: 13-17, 19-21 and 137-163.

[0074] In another embodiment, one of Z1 and Z3 comprises an amino acid sequence at least 50%, 55%, 60%, 65%, 70%, 75%, 80%, 85%, 90%, 91%, 92%, 93%, 94%, 95%, 96%, 97%, 98%, 99%, or 100% identical to the amino acid sequence selected from the group consisting of SEQ ID NOS: 1-10 and 102-136; and

[0075] the other of Z1 and Z3 comprises an amino acid sequence at least 50%, 55%, 60%, 65%, 70%, 75%, 80%, 85%, 90%, 91%, 92%, 93%, 94%, 95%, 96%, 97%, 98%, 99%, or 100% identical to the amino acid sequence selected from the group consisting of SEQ ID NOS: 33-34, 100-100, and 164.

[0076] In a further embodiment, one of Z1 and Z3 comprises an amino acid sequence at least 50%, 55%, 60%, 65%, 70%, 75%, 80%, 85%, 90%, 91%, 92%, 93%, 94%, 95%, 96%, 97%, 98%, 99%, or 100% identical to the amino acid sequence selected from the group consisting SEQ ID NOS: 13-17, 19-21 and 137-163; and

[0077] the other of Z1 and Z3 comprises an amino acid sequence at least 50%, 55%, 60%, 65%, 70%, 75%, 80%, 85%, 90%, 91%, 92%, 93%, 94%, 95%, 96%, 97%, 98%, 99%, or 100% identical to the amino acid sequence selected from the group consisting of SEQ ID NOS: 33-34, 100-100, and 164.

[0078] In another embodiment of any of the other embodiments disclosed herein, the polypeptide comprises at least 3 monomers (i.e.: 3, 4, 5, or more). In one such embodiment, the polypeptide comprises the formula B1-B2-Z1-Z2-Z3-B3-B4, wherein:

[0079] Z1, Z2, and Z3 are as defined above;

[0080] B2 and B3 comprise optional amino acid linkers; and

[0081] one or both of B1 and B4 independently comprise an amino acid sequence at least 50%, 55%, 60%, 65%, 70%, 75%, 80%, 85%, 90%, 91%, 92%, 93%, 94%, 95%, 96%, 97%, 98%, 99%, or 100% identical to the amino acid sequence selected from the group consisting of SEQ ID NOS: SEQ ID NOS: 1-17, 19-21, 23-34 and 100-164, wherein one of B1 and B4 may be absent. In one embodiment, one of B1 and B4 is absent. In another embodiment, both B1 and B4 are present. In one embodiment, B1 and B4 independently comprise an amino acid sequence at least 50%, 55%, 60%, 65%, 70%, 75%, 80%, 85%, 90%, 91%, 92%, 93%, 94%, 95%, 96%, 97%, 98%, 99%, or 100% identical to the amino acid sequence selected from the group consisting of SEQ ID NOS: 1-17, 19-21, 23-34 and 100-164. In this embodiment, B1 and B4 may be identical or may be different. In one embodiment, B1 when present and B4 when present, are identical to one or both of Z1 and Z3. In another embodiment, B1 when present and B4 when present, are not identical to either of Z1 and Z3.

[0082] In one embodiment, B1 when present, and B4 when present, independently comprise an amino acid sequence at least 50%, 55%, 60%, 65%, 70%, 75%, 80%, 85%, 90%, 91%, 92%, 93%, 94%, 95%, 96%, 97%, 98%, 99%, or 100% identical to the amino acid sequence selected from the group consisting of SEQ ID NOS: 1-10, 13-17, 19-21, 33-34, 100-101, and 102-164.

[0083] In another embodiment, B1 when present, and B4 when present, independently comprise an amino acid sequence at least 50%, 55%, 60%, 65%, 70%, 75%, 80%, 85%, 90%, 91%, 92%, 93%, 94%, 95%, 96%, 97%, 98%, 99%, or 100% identical to the amino acid sequence selected from the group consisting of SEQ ID NOS: 1-10 and 102-136.

[0084] In a further embodiment, B1 when present, and B4 when present, independently comprise an amino acid sequence at least 50%, 55%, 60%, 65%, 70%, 75%, 80%, 85%, 90%, 91%, 92%, 93%, 94%, 95%, 96%, 97%, 98%, 99%, or 100% identical to the amino acid sequence selected from the group consisting of SEQ ID NOS: 13-17, 19-21 and 137-163.

[0085] In a still further embodiment, B1 when present, and B4 when present, independently comprise an amino acid sequence at least 50%, 55%, 60%, 65%, 70%, 75%, 80%, 85%, 90%, 91%, 92%, 93%, 94%, 95%, 96%, 97%, 98%, 99%, or 100% identical to the amino acid sequence selected from the group consisting of SEQ ID NOS: 33-34, 100-101, and 164.

[0086] In various embodiments when both B1 and B4 are present,
[0087] one of B1 and B4 comprises an amino acid sequence at least 50%, 55%, 60%, 65%, 70%, 75%, 80%, 85%, 90%, 91%, 92%, 93%, 94%, 95%, 96%, 97%, 98%, 99%, or 100% identical to the amino acid sequence selected from the group consisting of SEQ ID NOS: 1-10 and 102-136, and the other comprises an amino acid sequence at least 50%, 55%, 60%, 65%, 70%, 75%, 80%, 85%, 90%, 91%, 92%, 93%, 94%, 95%, 96%, 97%, 98%, 99%, or 100% identical to the amino acid sequence selected from the group consisting of SEQ ID NOS: 13-17, 19-21 and 137-163;
[0088] one of B1 and B4 comprises an amino acid sequence at least 50%, 55%, 60%, 65%, 70%, 75%, 80%, 85%, 90%, 91%, 92%, 93%, 94%, 95%, 96%, 97%, 98%, 99%, or 100% identical to the amino acid sequence selected from the group consisting of SEQ ID NOS: 1-10 and 102-136, and the other comprises an amino acid sequence at least 50%, 55%, 60%, 65%, 70%, 75%, 80%, 85%, 90%, 91%, 92%, 93%, 94%, 95%, 96%, 97%, 98%, 99%, or 100% identical to the amino acid sequence selected from the group consisting of SEQ ID NOS: 33-34, 100-101, and 164, or
[0089] one of B1 and B4 comprises an amino acid sequence at least 50%, 55%, 60%, 65%, 70%, 75%, 80%, 85%, 90%, 91%, 92%, 93%, 94%, 95%, 96%, 97%, 98%, 99%, or 100% identical to the amino acid sequence selected from the group consisting of SEQ ID NOS: 13-17, 19-21 and 137-163, and the other comprises an amino acid sequence at least 50%, 55%, 60%, 65%, 70%, 75%, 80%, 85%, 90%, 91%, 92%, 93%, 94%, 95%, 96%, 97%, 98%, 99%, or 100% identical to the amino acid sequence selected from the group consisting of SEQ ID NOS: 33-34, 100-101, and 164.

[0090] In various non-limiting embodiments, the polypeptides comprise an amino acid sequence at least 50%, 55%, 60%, 65%, 70%, 75%, 80%, 85%, 90%, 91%, 92%, 93%, 94%, 95%, 96%, 97%, 98%, 99%, or 100% identical to the amino acid sequence selected from the group consisting of SEQ ID NOS:47-60, 193-355, and 454-588 and a genus selected from those recited in the right hand column of Table 8 wherein genus positions X1, X2, X3, and X4 may be present or absent, and when present may be any sequence of 1 or more amino acids. In all embodiments, any N-terminal methionine residues may be present or absent in the polypeptide. In one embodiment, any N-terminal methionine residues are absent in the polypeptide.

>LCB1-6GS-LCB1
(SEQ ID NO: 47)
DKEWILQKIYEIMRLLDELGHAEASMRVSDLIYEFMKKGDERLLEEAERLLEEVERGGSGGSDKEWILQKIYEIMRLLDELGH
AEASMRVSDLIYEFMKKGDERLLEEAERLLEEVER
>LCB1-12GS-LCB1
(SEQ ID NO: 48)
DKEWILQKIYEIMRLLDELGHAEASMRVSDLIYEFMKKGDERLLEEAERLLEEVERGGSGGSGSGGSGDKEWILQKIYEIMRL
LDELGHAEASMRVSDLIYEFMKKGDERLLEEAERLLEEVER
>LCB1-24GS-LCB1
(SEQ ID NO: 49)
DKEWILQKIYEIMRLLDELGHAEASMRVSDLIYEFMKKGDERLLEEAERLLEEVERGGGSGGGSSGGSGGSSGGGSGGGSDKE
WILQKIYEIMRLLDELGHAEASMRVSDLIYEFMKKGDERLLEEAERLLEEVER
>LCB1-36GS-LCB1
(SEQ ID NO: 50)
GGGGSGGGSDKEWILQKIYEIMRLLDELGHAEASMRVSDLIYEFMKKGDERLLEEAERLLEEVER
>LCB1_v1.1-GSLCB1_v1.1(1GS1)
(SEQ ID NO: 51)
DKENILQKIYEIMKTLDOLGHAEASMQVSDLIYEFMKQGDERLLEEAERLLEEVERGGGGSGGGGSGGGGSGGGGSGGGGSGG
GGSGGGGSGGGGSGGGGSGGGGSGGGGSGGGGSGGGGSGGGGSGGGGSDKENILQKIYEIMKTLDQLGHAEASMQVSDLIYEF
MKQGDERLLEEAERLLEEVER
>LCB1_v1.1-PRO-LCB1_v1.1(1PRO1)
(SEQ ID NO: 52)
DKENILQKIYEIMKTLDQLGHAEASMQVSDLIYEFMKQGDERLLEEAERLLEEVERAGSGGSGGSGGSPVPSTPPTPSPSTPP
TPSPSPVPSTPPTPSPSTPPTPSPSPVPSTPPTPSPSTPPTPSPSASGDKENILQKIYEIMKTLDQLGHAEASMQVSDLIYEF
MKQGDERLLEEAERLLEEVER
>LCB3_v1.2-GS3-LCB3_v1.2(3GS3)
(SEQ ID NO: 53)
NDDELHMQMTDLVYEALHFAKDEEIQKHVFQLFEKATKAYKNKDRQKLEKVVEELKELLERLLSGGGGSGGGGSGGGGSGGGG
SGGGGSGGGGSGGGGSGGGGSGGGGSGGGGSGGGGSGGGGSGGGGSGGGGSGGGGSNDDELHMQMTDLVYEALHFAKDEEIQK
HVFQLFEKATKAYKNKDRQKLEKVVEELKELLERLLS
>LCB3_v1.2-PRO-LCB3_v1.2(3PRO3)
(SEQ ID NO: 54)
NDDELHMQMTDLVYEALHFAKDEEIQKHVFQLFEKATKAYKNKDRQKLEKVVEELKELLERLLSAGSGGSGGSGGSPVPSTPP
TPSPSTPPTPSPSPVPSTPPTPSPSTPPTPSPSPVPSTPPTPSPSTPPTPSPSASGNDDELHMQMTDLVYEALHFAKDEEIQK
HVFQLFEKATKAYKNKDRQKLEKVVEELKELLERLLS
>LCB1_v1.1-GS-LCB3_v1.2(1GS3)
(SEQ ID NO: 55)
DKENILQKIYEIMKTLDQLGHAEASMQVSDLIYEFMKQGDERLLEEAERLLEEVERGGGGSGGGGSGGGGSGGGGSGGGGSGG
GGSGGGGSGGGGSGGGGSGGGGSGGGGSGGGGSGGGGSGGGGSGGGGSNDDELHMQMTDLVYEALHFAKDEEIQKHVFQLFEK
ATKAYKNKDRQKLEKVVEELKELLERLLS
>LCB3_v1.2-GS-LCB1_v1.1(3GS1)
(SEQ ID NO: 56)
NDDELHMQMTDLVYEALHFAKDEEIQKHVFQLFEKATKAYKNKDRQKLEKVVEELKELLERLLSGGGGSGGGGSGGGGSGGGG
SGGGGSGGGGSGGGGSGGGGSGGGGSGGGGSGGGGSGGGGSGGGGSGGGGSGGGGSDKENILQKIYEIMKTLDQLGHAEASMQ
VSDLIYEFMKOGDERLLEEAERLLEEVER
>LCB3_v1.2-10GS-LCB1_v1.1(LCB3-GS10-LCB1)
(SEQ ID NO: 57)
NDDELHMQMTDLVYEALHFAKDEEIQKHVFQLFEKATKAYKNKDRQKLEKVVEELKELLERLLSGGSGGSGGSGDKENILQKI
YEIMKTLDQLGHAEASMQVSDLIYEFMKQGDERLLEEAERLLEEVER
>LCB1_v1.1-PRO-LCB3_v1.2(1PRO3)
(SEQ ID NO: 58)
DKENILQKIYEIMKTLDQLGHAEASMQVSDLIYEFMKQGDERLLEEAERLLEEVERAGSGGSGGSGGSPVPSTPPTPSPSTPP
TPSPSPVPSTPPTPSPSTPPTPSPSPVPSTPPTPSPSTPPTPSPSASGNDDELHMQMTDLVYEALHFAKDEEIQKHVFQLFEK
ATKAYKNKDRQKLEKVVEELKELLERLLS
>LCB3_v1.2-PRO-LCB1_v1.1(3PRO1)
(SEQ ID NO: 59)
NDDELHMQMTDLVYEALHFAKDEEIQKHVFQLFEKATKAYKNKDRQKLEKVVEELKELLERLLSAGSGGSGGSGGSPVPSTPP
TPSPSTPPTPSPSPVPSTPPTPSPSTPPTPSPSPVPSTPPTPSPSTPPTPSPSASGDKENILQKIYEIMKTLDQLGHAEASMQ
VSDLIYEFMKQGDERLLEEAERLLEEVER
>36175(5_LCB1_linker14)
(SEQ ID NO : 60)
DKEWILQKIYEIMRLLDELGHAEASMRVSDLIYEFMKKGDERLLEEAERLLEEVERGGSGSSGGSGSGSGDKEWILQKIYEIM
RLLDELGHAEASMRVSDLIYEFMKKGDERLLEEAERLLEEVERGGSGSSGGSGSGSGDKEWILQKIYEIMRLLDELGHAEASM
RVSDLIYEFMKKGDERLLEEAERLLEEVERGGSGSSGGSGSGSGDKEWILQKIYEIMRLLDELGHAEASMRVSDLIYEFMKKG
DERLLEEAERLLEEVERGGSGSSGGSGSGSGDKEWILQKIYEIMRLLDELGHAEASMRVSDLIYEFMKKGDERLLEEAERLLE
EVER

Daisy Chain Designs

| | | Annotated: X1, X2, X3, and X4 may be |
|---|---|---|
| | | present or absent, and when present |
| | | may be any sequence of 1 or more |
| Name | Protein | amino acids |
| 1GS1 | MEKKIGSSAWSHPQFEKGGGSGGGSGGSAWSHPQFE | X1- |
| | KGGSGSSGGGGDKENILQKIYEIMKTLDQLGHAEAS | DKENILQKIYEIMKTLDQLGHAEASMQVSDLIYEF |
| | MQVSDLIYEFMKQGDERLLEEAERLLEEVERGGGGS | MKQGDERLLEEAERLLEEVER(SEQ ID NO: 4)- |
| | GGGGSGGGGSGGGGSGGGGSGGGGSGGGGSGGGGSG | X2- |
| | GGGSGGGGSGGGGSGGGGSGGGGSGGGGSGGGGSDK | DKENILQKIYEIMKTLDQLGHAEASMQVSDLIYEF |
| | ENILQKIYEIMKTLDQLGHAEASMQVSDLIYEFMKQ | MKQGDERLLEEAERLLEEVER(SEQ ID NO: 4) |
| | GDERLLEEAERLLEEVER(SEQ ID NO: 193) | |
| 1PR01 | MEKKIGSSAWSHPQFEKGGGSGGGSGGSAWSHPQFE | X1- |
| | KGGSGSSGGGGDKENILQKIYEIMKTLDQLGHAEAS | DKENILQKIYEIMKTLDQLGHAEASMQVSDLIYEF |
| | MQVSDLIYEFMKQGDERLLEEAERLLEEVERAGSGG | MKQGDERLLEEAERLLEEVER(SEQ ID NO: 4)- |
| | SGGSGGSPVPSTPPTPSPSTPPTPSPSPVPSTPPTP | X2- |
| | SPSTPPTPSPSPVPSTPPTPSPSTPPTPSPSASGDK | DKENILQKIYEIMKTLDQLGHAEASMQVSDLIYEF |
| | ENILQKIYEIMKTLDQLGHAEASMQVSDLIYEFMKQ | MKQGDERLLEEAERLLEEVER(SEQ ID NO: 4) |
| | GDERLLEEAERLLEEVER(SEQ ID NO: 194) | |
| 3GS3 | MEKKIGSSAWSHPQFEKGGGSGGGSGGSAWSHPQFE | X1- |
| | KGGSGSSGGGGNDDELHMQMTDLVYEALHFAKDESI | NDDELHMQMTDLVYEALHFAKDEEIQKHVFQLFEK |
| | QKHVFQLFEKATKAYKNKDRQKLEKVVEELKELLSR | ATKAYKNKDRQKLEKVVEELKELLERLLS |
| | LLSGGGGSGGGGSGGGGSGGGGSGGGGSGGGGSGGG | (SEQ ID NO: 15)-X2- |
| | GSGGGGSGGGGSGGGGSGGGGSGGGGSGGGGSGGGG | NDDELHMQMTDLVYEALHFAKDEEIQKHVFQLFEK |
| | SGGGGSNDDELHMQMTDLVYEALHFAKDEEIQKHVF | ATKAYKNKDRQKLEKVVEELKELLERLLS |
| | QLFEKATKAYKNKDRQKLEKVVEELKELLERLLS | (SEQ ID NO: 15) |
| | (SEQ ID NO: 195) | |
| 3PR03 | MEKKIGSSAWSHPQFEKGGGSGGGSGGSAWSHPQFE | X1- |
| | KGGSGSSGGGGNDDELHMQMTDLVYEALHFAKDE2I | NDDELHMQMTDLVYEALHFAKDEEIQKHVFQLFEK |
| | QKHVFQLFEKATKAYKNKDRQKLEKVVEELKELL2R | ATKAYKNKDRQKLEKVVEELKELLERLLS |
| | LLSAGSGGSGGSGGSPVPSTPPTPSPSTPPTPSPSP | (SEQ ID NO: 15)-X2- |
| | VPSTPPTPSPSTPPTPSPSPVPSTPPTPSPSTPPTP | NDDELHMQMTDLVYEALHFAKDEEIQKHVFQLFEK |
| | SPSASGNDDELHMQMTDLVYEALHFAKDEEIQKHVF | ATKAYKNKDRQKLEKVVEELKELLERLLS |
| | QLFEKATKAYKNKDRQKLEKVVEELKELLERLLS | (SEQ ID NO: 15) |
| | (SEQ ID NO: 196) | |
| 1GS3 | MEKKIGSSAWSHPQFEKGGGSGGGSGGSAWSHPQFE | X1- |
| | KGGSGSSGGGGDKENILQKIYEIMKTLDQLGHAEAS | DKENILQKIYEIMKTLDQLGHAEASMQVSDLIYEF |
| | MQVSDLIYEFMKQGDERLLEEAERLLEEVERGGGGS | MKQGDERLLEEAERLLEEVER(SEQ ID NO: 4)- |
| | GGGGSGGGGSGGGGSGGGGSGGGGSGGGGSGGGGSG | X2- |
| | GGGSGGGGSGGGGSGGGGSGGGGSGGGGSGGGGSND | NDDELHMQMTDLVYEALHFAKDEEIQKHVFQLFEK |
| | DELHMQMTDLVYEALHFAKDEEIQKHVFQLFEKATK | ATKAYKNKDRQKLEKVVEELKELLERLLS(SEQ |
| | AYKNKDRQKLEKVVEELKELLERLLS | ID NO: 15) |
| | (SEQ ID NO: 197) | |
| 3GS1 | MEKKIGSSAWSHPQFEKGGGSGGGSGGSAWSHPQFE | X1- |
| | KGGSGSSGGGGNDDELHMQMTDLVYEALHFAKDESI | NDDELHMQMTDLVYEALHFAKDEEIQKHVFQLFEK |
| | QKHVFQLFEKATKAYKNKDRQKLEKVVEELKELLER | ATKAYKNKDRQKLEKVVEELKELLERLLS(SEQ |
| | LLSGGGGSGGGGSGGGGSGGGGSGGGGSGGGGSGGG | ID NO: 15)-X2- |
| | GSGGGGSGGGGSGGGGSGGGGSGGGGSGGGGSGGGG | DKENILQKIYEIMKTLDQLGHAEASMQVSDLIYEF |
| | SGGGGSDKENILQKIYEIMKTLDQLGHAEASMQVSD | MKQGDERLLEEAERLLEEVER(SEQ ID NO: 4) |
| | LIYEFMKQGDERLLEEAERLLEEVER | |
| | (SEQ ID NO: 198) | |
| 1PR03 | MEKKIGSSAWSHPQFEKGGGSGGGSGGSAWSHPQFE | X1- |
| | KGGSGSSGGGGDKENILQKIYEIMKTLDQLGHAEAS | DKENILQKIYEIMKTLDQLGHAEASMQVSDLIYEF |
| | MQVSDLIYEFMKQGDERLLEEAERLLEEVERAGSGG | MKQGDERLLEEAERLLEEVER(SEQ ID NO: 4)- |
| | SGGSGGSPVPSTPPTPSPSTPPTPSPSPVPSTPPTP | X2- |
| | SPSTPPTPSPSPVPSTPPTPSPSTPPTPSPSASGND | NDDELHMQMTDLVYEALHFAKDEEIQKHVFQLFEK |
| | DELHMQMTDLVYEALHFAKDEEIQKHVFQLFEKATK | ATKAYKNKDRQKLEKVVEELKELLERLLS(SEQ |
| | AYKNKDRQKLEKVVEELKELLERLLS | ID NO: 15) |
| | (SEQ ID NO: 199) | |
| 3PR01 | MEKKIGSSAWSHPQFEKGGGSGGGSGGSAWSHPQFE | X1- |
| | KGGSGSSGGGGNDDELHMQMTDLVYEALHFAKDEEI | NDDELHMQMTDLVYEALHFAKDEEIQKHVFQLF |
| | QKHVFQLFEKATKAYKNKDRQKLEKVVEELKELLERL | EKATKAYKNKDRQKLEKVVEELKELLERLLS |
| | LSAGSGGSGGSGGSPVPSTPPTPSPSTPPTPSPSPV | (SEQ ID NO: 15)- |
| | PSTPPTPSPSTPPTPSPSPVPSTPPTPSPSTPPTPS | X2- |
| | PSASGDKENILQKIYEIMKTLDQLGHAEASMQVSDL | DKENILQKIYEIMKTLDQLGHAEASMQVSDLIY |
| | IYEFMKQGDERLLEEAERLLEEVER | EFMKQGDERLLEEAERLLEEVER |
| | (SEQ ID NO: 200) | (SEQ ID NO: 4) |
| CSL- | MEKKISAWSHPQFEKGGGSGGGSGGSAWSHPQFEKG | X1- |
| LCB1- | GSGSSGDKEWILQKIYEIMRLLDELGHAEASMRVSD | DKEWILQKIYEIMRLLDELGHAEASMRVSDLIY |
| GS15- | LIYEFMKKGDERLLEEAERLLEEVERGGGGSGGGGS | EFMKKGDERLLEEAERLLEEVER |
| LCB1 | GGGGSDKEWILQKIYEIMRLLDELGHAEASMRVSDL | (SEQ ID NO: 1)- |
| | IYEFMKKGDERLLEEAERLLEEVER | X2- |
| | (SEQ ID NO: 201) | DKEWILQKIYEIMRLLDELGHAEASMRVSD |
| | | LIYEFMKKGDERLLEEAERLLEEVER |
| | | (SEQ ID NO: 1) |
| CSL- | MEKKISAWSHPQFEKGGGSGGGSGGSAWSHPQFEKG | X1- |
| LCB3- | GSGSSGNDDELHMLMTDLVYEALHFAKDEEIKKRVF | NDDELHMLMTDLVYEALHFAKDEEIKKRVFQLF |
| GS15- | QLFELADKAYKNNDRQKLEKVVEELKELLERLLSGGG | ELADKAYKNNDRQKLEKVVEELKELLERLLS |
| LCB3 | GSGGGGSGGGGSNDDELHMLMTDLVYEALHFAKDEE | (SEQ ID NO: 13)- |
| | IKKRVFQLFELADKAYKNNDRQKLEKVVEELKELLER | X2- |
| | LLS | NDDELHMLMTDLVYEALHFAKDEEIKKRVFQLF |
| | (SEQ ID NO: 202) | ELADKAYKNNDRQKLEKVVEELKELLERLLS |
| | | (SEQ ID NO: 13) |
| CSL- | MEKKISAWSHPQFEKGGGSGGGSGGSAWSHPQFEKG | X1- |
| LCB1- | GSGSSGDKEWILQKIYEIMRLLDELGHAEASMRVSD | DKEWILQKIYEIMRLLDELGHAEASMRVSDLIY |
| GS20- | LIYEFMKKGDERLLEEAERLLEEVERGGGGSGGGGS | EFMKKGDERLLEEAERLLEEVER |
| LCB1 | GGGGSGGGGSDKEWILQKIYEIMRLLDELGHAEASM | (SEQ ID NO: 1)- |
| | RVSDLIYEFMKKGDERLLEEAERLLEEVER | X2- |
| | (SEQ ID NO: 203) | DKEWILQKIYEIMRLLDELGHAEASMRVSD |
| | | LIYEFMKKGDERLLEEAERLLEEVER |
| | | (SEQ ID NO: 1) |
| CSL- | MEKKISAWSHPQFEKGGGSGGGSGGSAWSHPQFEK | X1- |
| LCB3- | GGSGSSGNDDELHMLMTDLVYE1ALHFAKDEEIKKR | NDDELHMLMTDLVYEALHFAKDEEIKKRVFQLF |
| GS20- | VFQLFELADKAYKNNDRQKLEKVVEELKELLERLLSG | ELADKAYKNNDRQKLEKVVEELKELLERLLS |
| LCB3 | GGGSGGGGSGGGGSGGGGSNDDELHMLMTDLVYEAL | (SEQ ID NO: 13)- |
| | HFAKDEEIKKRVFQLFELADKAYKNNDRQKLEKVVEE | X2- |
| | LKELLERLLS | NDDELHMLMTDLVYEALHFAKDEEIKKRVFQLF |
| | (SEQ ID NO: 204) | ELADKAYKNNDRQKLEKVVEELKELLERLLS |
| | | (SEQ ID NO: 13) |
| CSL- | MEKKISAWSHPQFEKGGSGSSGDKEWILQKIYEIMR | X1- |
| LCB1- | LLDELGHAEASMRVSDLIYEFMKKGDERLLEEAERL | DKEWILQKIYEIMRLLDELGHAEASMRVSDLIY |
| GS20- | LEEVERGSSGSGSSGSGSSGSGSSGSDKEWILQKIY | EFMKKGDERLLEEAERLLEEVER |
| LCB1- | EIMRLLDELGHAEASMRVSDLIYEFMKKGDERLLEE | (SEQ ID NO: 1)- |
| GS20- | AERLLEEVERGSSSGGSSSGGSSSGGSSSGDKEWIL | X2- |
| LCB1 | QKIYEIMRLLDELGHAEASMRVSDLIYEFMKKGDER | DKEWILQKIYEIMRLLDELGHAEASMRVSD |
| | LLEEAERLLEEVER | LIYEFMKKGDERLLEEAERLLEEVER |
| | (SEQ ID NO: 205) | (SEQ ID NO: 1)- |
| | | X3- |
| | | DKEWILQKIYEIMRLLDELGHAEASMR |
| | | VSDLIYEFMKKGDERLLEEAERLLEEVER |
| | | (SEQ ID NO: 1) |
| CSL- | MEKKISAWSHPQFEKGGSGSSGNDDELHMLMTDLVY | X1- |
| LCB3- | EALHFAKDEEIKKRVFQLFELADKAYKNNDRQKLEK | NDDELHMLMTDLVYEALHFAKDEEIKKRVFQLF |
| GS20- | WEELKELLERLLSGSSGSGSSGSGSSGSGSSGSNDD | ELADKAYKNNDRQKLEKVVEELKELLERLLS |
| LCB3- | ELHMLMTDLVYEALHFAKDEEIKKRVFQLFELADKA | (SEQ ID NO: 13)- |
| GS20- | YKNNDRQKLEKVVEELKELLERLLSGSSSGGSSSGGS | X2- |
| LCB3 | SSGGSSSGNDDELHMLMTDLVYEALHFAKDEEIKKR | DDELHMLMTDLVYEALHFAKDEEIKKRVFQLFEL |
| | VFQLFELADKAYKNNDRQKLEKVVEELKELLERLLS | ADKAYKNNDRQKLEKVVEELKELLERLLS |
| | (SEQ ID NO: 206) | (SEQ ID NO: 13)- |
| | | X3- |
| | | NDDELHMLMTDLVYEALHFAKDEEIKKRVFQLF |
| | | ELADKAYKNNDRQKLEKVVEELKELLERLLS |
| | | (SEQ ID NO: 13) |
| CSL- | MEKKISAWSHPQFEKGGGSGGGSGGSAWSHPQFEKG | X1- |
| LCB1- | GSGSSGDKEWILQKIYEIMRLLDELGHAEASMRVSD | DKEWILQKIYEIMRLLDELGHAEASMRVSDLIY |
| XTENx2 | LIYEFMKKGDERLLEEAERLLEEVERGSAGGSPAGS | EFMKKGDERLLEEAERLLEEVER |
| | PTSTGTSTSGDKEWILQKIYEIMRLLDELGHAEASM | (SEQ ID NO: 1)- |
| | RVSDLIYEFMKKGDERLLEEAERLLEEVER | X2- |
| | (SEQ ID NO: 207) | DKEWILQKIYEIMRLLDELGHAEASMRVSD |
| | | LIYEFMKKGDERLLEEAERLLEEVER |
| | | (SEQ ID NO: 1) |
| CSL- | MEKKISAWSHPQFEKGGGSGGGSGGSAWSHPQFEK | X1- |
| LCB1- | GGSGSSGDKEWILQKIYEIMRLLDELGHAEASMRVS | DKEWILQKIYEIMRLLDELGHAEASMRVSDLIY |
| XTENx | DLIYEFMKKGDERLLEEAERLLEEVERGSAGGSPAG | EFMKKGDERLLEEAERLLEEVER |
| 3 | S | (SEQ ID NO: 1) |
| | PTSTGTSGSGDKEWILQKIYEIMRLLDELGHAEASM | -X2- |
| | RVSDLIYEFMKKGDERLLEEAERLLEEVERGSAGGS | DKEWILQKIYEIMRLLDELGHAEASMRVSDLIYEF |
| | PAGSPTSTGTSGSGDKEWILQKIYEIMRLLDELGHA | MKKGDERLLEEAERLLEEVER(SEQ ID NO: 1) |
| | EASMRVSDLIYEFMKKGDERLLEEAERLLEEVER | -X3- |
| | (SEQ ID NO: 208) | DKEWILQKIYEIMRLLDELGHAEASMRVSDLIYEF |
| | | MKKGDERLLEEAERLLEEVER(SEQ ID NO: 1) |
| CSL- | MEKKISAWSHPQFEKGGGSGGGSGGSAWSHPQFEKG | X1-NDDELHMLMTDLVYEALHFAKDEEIKKRVFQLFEL |
| LCB3- | GSGSSGNDDELHMLMTDLVYEALHFAKDEEIKKRVF | ADKAYKNNDRQKLEKVVEELKELLERLLS |
| XTENx | QLFELADKAYKNNDRQKLEKVVEELKELLERLLSGS | (SEQ ID NO: 13) |
| 2 | AGGSPAGSPTSTGTSGSGNDDELHMLMTDLVYEALH | -X2- |
| | FAKDEEIKKRVFQLFELADKAYKNNDRQKLEKVVEE | NDDELHMLMTDLVYEALHFAKDEEIKKRVFQLFEL |
| | LKELLERLLS | ADKAYKNNDRQKLEKVVEELKELLERLLS |
| | (SEQ ID NO: 209) | (SEQ ID NO: 13) |
| CSL- | MEKKISAWSHPQFEKGGGSGGGSGGSAWSHPQFEKG | X1-NDDELHMLMTDLVYEALHFAKDEEIKKRVFQLFEL |
| LCB3- | GSGSSGNDDELHMLMTDLVYEALHFAKDEEIKKRVF | ADKAYKNNDRQKLEKVVEELKELLERLLS |
| XTENx | QLFELADKAYKNNDRQKLEKVVEELKELLERLLSGS | (SEQ ID NO: 13) |
| 3 | AGGSPAGSPTSTGTSGSGNDDELHMLMTDLVYEALH | -X2- |
| | FAKDEEIKKRVFQLFELADKAYKNNDRQKLEKVVEE | NDDELHMLMTDLVYEALHFAKDEEIKKRVFQLFEL |
| | LKELLERLLSGSAGGSPAGSPTSTGTSGSGNDDELH | ADKAYKNNDRQKLEKVVEELKELLERLLS |
| | MLMTDLVYEALHFAKDEEIKKRVFQLFELADKAYKN | (SEQ ID NO: 13) |
| | NDRQKLEKVVEELKELLERLLS | -X3- |
| | (SEQ ID NO: 210) | NDDELHMLMTDLVYEALHFAKDEEIKKRVFQLFEL |
| | | ADKAYKNNDRQKLEKVVEELKELLERLLS |
| | | (SEQ ID NO: 13) |
| C- | MEKKISSGDKEWILQKIYEIMRLLDELGHAEASMRV | X1-DKEWILQKIYEIMRLLDELGHAEASMRVSDLIYEF |
| LCB1- | SDLIYEFMKKGDERLLEEAERLLEEVERGSSGSGSS | MKKGDERLLEEAERLLEEVER |
| GS20- | GSGSSGSGSSGSDKEWILQKIYEIMRLLDELGHAEA | (SEQ ID NO: 1) |
| LCB1- | SMRVSDLIYEFMKKGDERLLEEAERLLEEVERGSSS | -X2- |
| GS20- | GGSSSGGSSSGGSSSGDKEWILQKIYEIMRLLDELG | DKEWILQKIYEIMRLLDELGHAEASMRVSDLIYEF |
| LCB1- | HAEASMRVSDLIYEFMKKGDERLLEEAERLLEEVER | MKKGDERLLEEAERLLEEVER |
| LS | GGSGSSGSAWSHPQFEK(SEQ ID NO: 211) | (SEQ ID NO: 1) |
| | | -X3- |
| | | DKEWILQKIYEIMRLLDELGHAEASMRVSDLIYEF |
| | | MKKGDERLLEEAERLLEEVER |
| | | (SEQ ID NO: 1)-X4 |
| C- | MEKKISSGNDDELHMLMTDLVYEALHFAKDEEIKKR | X1-NDDELHMLMTDLVYEALHFAKDEEIKKRVFQLFEL |
| LCB3- | VFQLFELADKAYKNNDRQKLEKVVEELKELLERLLS | ADKAYKNNDRQKLEKVVEELKELLERLLS |
| GS2Q- | GSSGSGSSGSGSSGSGSSGSNDDELHMLMTDLVYEA | (SEQ ID NO: 13) |
| LCB3- | LHFAKDEEIKKRVFQLFELADKAYKNNDRQKLEKW | -X2- |
| GS20- | EELKELLERLLSGSSSGGSSSGGSSSGGSSSGNDDE | NDDELHMLMTDLVYEALHFAKDEEIKKRVFQLFEL |
| LCB3- | LHMLMTDLVYEALHFAKDEEIKKRVFQLFELADKAY | ADKAYKNNDRQKLEKVVEELKELLERLLS |
| LS | KNNDRQKLEKVVEELKELLERLLSGGSGSSGSAWSH | (SEQ ID NO: 13) |
| | PQFEK | -X3- |
| | (SEQ ID NO: 212) | NDDELHMLMTDLVYEALHFAKDEEIKKRVFQLFEL |
| | | ADKAYKNNDRQKLEKVVEELKELLERLLS |
| | | (SEQ ID NO: 13)-X4 |
| CSL- | MEKKISAWSHPQFEKGGGSGGGSGGSAWSHPQFEKG | X1-DKEWILQKIYEIMRLLDELGHAEASMRVSDLIYEF |
| LCB1- | GSGSSGDKEWILQKIYEIMRLLDELGHAEASMRVSD | MKKGDERLLEEAERLLEEVER |
| XTEN2 | LIYEFMKKGDERLLEEAERLLEEVERGGSSAGSPTS | (SEQ ID NO: 1) |
| 5x3 | TGTSSATPSGSGTGGDKEWILQKIYEIMRLLDELGH | -X2- |
| | AEASMRVSDLIYEFMKKGDERLLEEAERLLEEVERG | DKEWILQKIYEIMRLLDELGHAEASMRVSDLIYEF |
| | GSSAGSPTSTGTSSATPSGSGTGGDKEWILQKIYEI | MKKGDERLLEEAERLLEEVER |
| | MRLLDELGHAEASMRVSDLIYEFMKKGDERLLEEAE | (SEQ ID NO: 1)-X3 |
| | RLLEEVER | DKEWILQKIYEIMRLLDELGHAEASMRVSDLIYEF |
| | (SEQ ID NO: 213) | MKKGDERLLEEAERLLEEVER |
| | | (SEQ ID NO: 1) |
| CSL- | MEKKISAWSHPQFEKGGGSGGGSGGSAWSHPQFEKG | X1-NDDELHMLMTDLVYEALHFAKDEEIKKRVFQLF |
| LCB3- | GSGSSGNDDELHMLMTDLVYEALHFAKDEEIKKRVF | ELADKAYKNNDRQKLEKVVEELKELLERLLS |
| XTEN2 | QLFELADKAYKNNDRQKLEKVVEELKELLERLLSGG | (SEQ ID NO: 13) |
| 5x3 | SSAGSPTSTGTSSATPSGSGTGGNDDELHMLMTDLV | -X2- |
| | YEALHFAKDEEIKKRVFQLFELADKAYKNNDRQKLE | NDDELHMLMTDLVYEALHFAKDEEIKKRVFQLFEL |
| | KVVEELKELLERLLSGGSSAGSPTSTGTSSATPSGS | ADKAYKNNDRQKLEKVVEELKELLERLLS |
| | GTGGNDDELHMLMTDLVYEALHFAKDEEIKKRVFQL | (SEQ ID NO: 13) |
| | FELADKAYKNNDRQKLEKVVEELKELLERLLS | -X3- |
| | (SEQ ID NO: 214) | NDDELHMLMTDLVYEALHFAKDEEIKKRVFQLFEL |
| | | ADKAYKNNDRQKLEKVVEELKELLERLLS |
| | | (SEQ ID NO: 13) |
| LCB1 | MEKKISAWSHPQFEKGGGSGGGSGGSAWSHPQFEKG | X1-DKENILQKIYEIMKTLEQLGHAEASMQVSDLIYEF |
| v1.3_ | GSGSSGDKENILQKIYEIMKTLEQLGHAEASMQVSD | MKQGDERLLEEAERLLEEVER |
| GS_2X | LIYEFMKQGDERLLEEAERLLEEVERGGSSGGGSSG | (SEQ ID NO: 8) |
| | GGSSGGGSSGGGSSGDKENILQKIYEIMKTLEQLGH | -X2- |
| | AEASMQVSDLIYEFMKQGDERLLEEAERLLEEVER | DKENILQKIYEIMKTLEQLGHAEASMQVSDLIYEF |
| | (SEQ ID NO: 215) | MKQGDERLLEEAERLLEEVER(SEQ ID NO: 8) |
| LCB1 | MEKKISAWSHPQFEKGGGSGGGSGGSAWSHPQFEKG | X1- |
| _v1.3 | GSGSSGDKENILQKIYEIMKTLEQLGHAEASMQVSD | DKENILQKIYEIMKTLEQLGHAEASMQVSDLIYEF |
| XTEN | LIYEFMKQGDERLLEEAERLLEEVERGGSSAGSPTS | MKQGDERLLEEAERLLEEVER(SEQ ID NO: 8)- |
| 2X | TGTSSATPSGSGTGGDKENILQKIYEIMKTLEQLGH | X2- |
| | AEASMQVSDLIYEFMKQGDERLLEEAERLLEEVER | DKENILQKIYEIMKTLEQLGHAEASMQVSDLIYEF |
| | (SEQ ID NO: 216) | MKQGDERLLEEAERLLEEVER(SEQ ID NO: 8) |
| LCB1 | MEKKISAWSHPQFEKGGGSGGGSGGSAWSHPQFEKG | X1- |
| _v1.3 | GSGSSGDKENILQKIYEIMKTLEQLGHAEASMQVSD | DKENILQKIYEIMKTLEQLGHAEASMQVSDLIYEF |
| EAAAK | LIYEFMKQGDERLLEEAERLLEEVERGGSSGEAAAK | MKQGDERLLEEAERLLEEVER(SEQ ID NO: 8)- |
| _2X | EAAAKEAAAKGSSGGDKENILQKIYEIMKTLEQLGH | X2- |
| | AEASMQVSDLIYEFMKQGDERLLEEAERLLEEVER | DKENILQKIYEIMKTLEQLGHAEASMQVSDLIYEF |
| | (SEQ ID NO: 217) | MKQGDERLLEEAERLLEEVER(SEQ ID NO: 8) |
| LCB1 | MEKKISAWSHPQFEKGGGSGGGSGGSAWSHPQFEKG | X1- |
| _v1.3 | GSGSSGDKENILQKIYEIMKTLEQLGHAEASMQVSD | DKENILQKIYEIMKTLEQLGHAEASMQVSDLIYEF |
| Pro_2 | LIYEFMKQGDERLLEEAERLLEEVERGGSSGPSTPP | MKQGDERLLEEAERLLEEVER(SEQ ID NO: 8)- |
| X | TPSPSTPPTPSPSPGGSSGDKENILQKIYEIMKTLE | X2- |
| | QLGHAEASMQVSDLIYEFMKQGDERLLEEAERLLEE | DKENILQKIYEIMKTLEQLGHAEASMQVSDLIYEF |
| | VER(SEQ ID NO: 218) | MKQGDERLLEEAERLLEEVER(SEQ ID NO: 8) |
| LCB1_ | MEKKISAWSHPQFEKGGGSGGGSGGSAWSHPQFEKG | X1- |
| _v1.3 | GSGSSGDKENILQKIYEIMKTLEQLGHAEASMQVSD | DKENILQKIYEIMKTLEQLGHAEASMQVSDLIYEF |
| Ub_2X | LIYEFMKQGDERLLEEAERLLEEVERGGSSGQIFVK | MKQGDERLLEEAERLLEEVER(SEQ ID NO: 8)- |
| | TLTGKTITLEVEPSDTIENVKAKIQDKEGIPPDQQR | X2- |
| | LIFAGKQLEDGRTLSDYNIQKESTLHLVLRLRGGGG | DKENILQKIYEIMKTLEQLGHAEASMQVS DLIYEF |
| | SSGDKENILQKIYEIMKTLEQLGHAEASMQVSDLIY | MKQGDERLLEEAERLLEEVER(SEQ ID NO: 8) |
| | EFMKQGDERLLEEAERLLEEVER | |
| | (SEQ ID NO: 219) | |
| LCB1_ | MEKKISAWSHPQFEKGGGSGGGSGGSAWSHPQFEKG | X1-DKENILQKIYEIMKTLEQLGHAEASMQVSDLIYEF |
| V1.3 | GSGSSGDKENILQKIYEIMKTLEQLGHAEASMQVSD | MKQGDERLLEEAERLLEEVER(SEQ ID NO: 8)- |
| XTEN | LIYEFMKQGDERLLEEAERLLEEVERGGSSAGSPTS | X2- |
| 3X | TGTSSATPSGSGTGGDKENILQKIYEIMKTLEQLGH | DKENILQKIYEIMKTLEQLGHAEASMQVSDLIYEF |
| | AEASMQVSDLIYEFMKQGDERLLEEAERLLEEVERG | MKQGDERLLEEAERLLEEVER(SEQ ID NO: 8)- |
| | GSSAGSPTSTGTSSATPSGSGTGGDKENILQKIYEI | X3- |
| | MKTLEQLGHAEASMQVSDLIYEFMKQGDERLLEEAE | DKENILQKIYEIMKTLEQLGHAEASMQVSDLIYEF |
| | RLLEEVER(SEQ ID NO: 220) | MKQGDERLLEEAERLLEEVER(SEQ ID NO: 8) |
| LCB1 | MEKKISAWSHPQFEKGGGSGGGSGGSAWSHPQFEKG | X1-DKENILQKIYEIMKTLEQLGHAEASMQVSDLIYEF |
| V1.3_ | GSGSSGDKENILQKIYEIMKTLEQLGHAEASMQVSD | MKQGDERLLEEAERLLEEVER(SEQ ID NO: 8)- |
| EAAAK | LIYEFMKQGDERLLEEAERLLEEVERGGSSGEAAAK | X2- |
| _3X | EAAAKEAAAKGSSGGDKENILQKIYEIMKTLEQLGH | DKENILQKIYEIMKTLEQLGHAEASMQVSDLIYEF |
| | AEASMQVSDLIYEFMKQGDERLLEEAERLLEEVERG | MKQGDERLLEEAERLLEEVER(SEQ ID NO: 8)- |
| | GSSGEAAAKEAAAKEAAAKGSSGGDKENILQKIYEI | X3- |
| | MKTLEQLGHAEASMQVSDLIYEFMKQGDERLLEEAE | DKENILQKIYEIMKTLEQLGHAEASMQVSDLIYEF |
| | RLLEEVER(SEQ ID NO: 221) | MKQGDERLLEEAERLLEEVER(SEQ ID NO: 8) |
| LCB1 | MEKKISAWSHPQFEKGGGSGGGSGGSAWSHPQFEKG | X1-DKENILQKIYEIMKTLEQLGHAEASMQVSDLIYEF |
| _v1.3_ | GSGSSGDKENILQKIYEIMKTLEQLGHAEASMQVSD | MKQGDERLLEEAERLLEEVER(SEQ ID NO: 8)- |
| Pro_3 | LIYEFMKQGDERLLEEAERLLEEVERGGSSGPSTPP | X2- |
| X | TPSPSTPPTPSPSPGGSSGDKENILQKIYEIMKTLE | DKENILQKIYEIMKTLEQLGHAEASMQVSDLIYEF |
| | QLGHAEASMQVSDLIYEFMKQGDERLLEEAERLLEE | MKQGDERLLEEAERLLEEVER(SEQ ID NO: 8)- |
| | VERGGSSGPSTPPTPSPSTPPTPSPSPGGSSGDKEN | X3- |
| | ILQKIYEIMKTLEQLGHAEASMQVSDLIYEFMKQGD | DKENILQKIYEIMKTLEQLGHAEASMQVSDLIYEF |
| | ERLLEEAERLLEEVER(SEQ ID NO: 222) | MKQGDERLLEEAERLLEEVER(SEQ ID NO: 8) |
| LCB1 | MEKKISAWSHPQFEKGGGSGGGSGGSAWSHPQFEKG | X1 |
| V1.3 | GSGSSGDKENILQKIYEIMKTLEQLGHAEASMQVSD | DKENILQKIYEIMKTLEQLGHAEASMQVSDLIY |
| Ub_3X | LIYEFMKQGDERLLEEAERLLEEVERGGSSGQIFVK | EFMKQGDERLLEEAERLLEEVER |
| | TLTGKTITLEVEPSDTIENVKAKIQDKEGIPPDQQR | (SEQ ID NO: 8}-X2- |
| | LIFAGKQLEDGRTLSDYNIQKESTLHLVLRLRGGGG | DKENILQKIYEIMKTLEQLGHAEASMQVSDLIYEF |
| | SSGDKENILQKIYEIMKTLEQLGHAEASMQVSDLIY | MKQGDERLLEEAERLLEEVER(SEQ ID NO: 8)- |
| | EFMKQGDERLLEEAERLLEEVERGGSSGQIFVKTLT | X3- |
| | GKTITLEVEPSDTIENVKAKIQDKEGIPPDQQRLIF | DKENILQKIYEIMKTLEQLGHAEASMQVSDLIYEF |
| | AGKQLEDGRTLSDYNIQKESTLHLVLRLRGGGGSSG | MKQGDERLLEEAERLLEEVER(SEQ ID NO: 8) |
| | DKENILQKIYEIMKTLEQLGHAEASMQVSDLIYEFM | |
| | KQGDERLLEEAERLLEEVER(SEQ ID NO: 223) | |
| 1GS1_ | MEKKISAWSHPQFEKGGGSGGGSGGSAWSHPQFEKG | X1- |
| NTS | GSGSSGDKENVLQKIYEIMKELERLGHAEASMQVSD | DKENVLQKIYEIMKELERLGHAEASMQVSDLIYEF |
| | LIYEFMKTKDENLLEEAERLLEEVKRGGSSGGGSSG | MKTKDENLLEEAERLLEEVKR(SEQ ID NO: 135) |
| | GGSSGGGSSGGGSSGDKENVLQKIYEIMKELERLGH | -X2- |
| | AEASMQVSDLIYEFMKTKDENLLEEAERLLEEVKR | DKENVLQKIYEIMKELERLGHAEASMQVSDLIYEF |
| | (SEQ ID NO: 224) | MKTKDENLLEEAERLLEEVKR(SEQ ID NO: 135) |
| 1Pro1 | MEKKISAWSHPQFEKGGGSGGGSGGSAWSHPQFEKG | X1- |
| _NTS | GSGSSGDKENVLQKIYEIMKELERLGHAEASMQVSD | DKENVLQKIYEIMKELERLGHAEASMQVSDLIYEF |
| | LIYEFMKTKDENLLEEAERLLEEVKRGGSSGPSTPP | MKTKDENLLEEAERLLEEVKR(SEQ ID NO: 135) |
| | TPSPSTPPTPSPSPGGSSGDKENVLQKIYEIMKELE | -X2- |
| | RLGHAEASMQVSDLIYEFMKTKDENLLEEAERLLEE | DKENVLQKIYEIMKELERLGHAEASMQVSDLIYEF |
| | VKR | MKTKDENLLEEAERLLEEVKR(SEQ ID NO: 135) |
| | (SEQ ID NO: 225) | |
| 3GS3_ | MEKKISAWSHPQFEKGGGSGGGSGGSAWSHPQFEKG | X1- |
| NTS | GSGSSGNLDELHMQMTDLVYEALHFAKDEEFQKHVF | NLDELHMQMTDLVYEALHFAKDEEFQKHVFQLFEK |
| | QLFEKATKAYKNKDRQKLEKVVEELKELLERLLSGG | ATKAYKNKDRQKLEKVVEELKELLERLLS |
| | SSGGGSSGGGSSGGGSSGGGSSGNLDELHMQMTDLV | (SEQ ID NO: 155) |
| | YEALHFAKDEEFQKHVFQLFEKATKAYKNKDRQKLE | -X2- |
| | KVVEELKELLERLLS | NLDELHMQMTDLVYEALHFAKDEEFQKHVFQLFEK |
| | (SEQ ID NO: 226) | ATKAYKNKDRQKLEKVVEELKELLERLLS |
| | | (SEQ ID NO: 155) |
| 3Pro3 | MEKKISAWSHPQFEKGGGSGGGSGGSAWSHPQFEKG | X1- |
| _NTS | GSGSSGNLDELHMQMTDLVYEALHFAKDEEFQKHVF | NLDELHMQMTDLVYEALHFAKDEEFQKHVFQLFEK |
| | QLFEKATKAYKNKDRQKLEKVVEELKELLERLLSGG | ATKAYKNKDRQKLEKVVEELKELLERLLS |
| | SSGPSTPPTPSPSTPPTPSPSPGGSSGNLDELHMQM | (SEQ ID NO: 155) |
| | TDLVYEALHFAKDEEFQKHVFQLFEKATKAYKNKDR | -X2- |
| | QKLEKVVEELKELLERLLS | NLDELHMQMTDLVYEALHFAKDEEFQKHVFQLFEK |
| | (SEQ ID NO: 227) | ATKAYKNKDRQKLEKVVEELKELLERLLS |
| | | (SEQ ID NO: 155) |
| 1GS1_ | MEKKIDKENVLQKIYEIMKELERLGHAEASMQVSDL | X1- |
| CTS | IYEFMKTKDENLLEEAERLLEEVKRGGSSGGGSSGG | DKENVLQKIYEIMKELERLGHAEASMQVSDLIYEF |
| | GSSGGGSSGGGSSGDKENVLQKIYEIMKELERLGHA | MKTKDENLLEEAERLLEEVKR(SEQ ID NO: 135) |
| | EASMQVSDLIYEFMKTKDENLLEEAERLLEEVKRGG | -X2- |
| | SGSSGSAWSHPQFEKGGGSGGGSGGSAWSHPQFEK | DKENVLQKIYEIMKELERLGHAEASMQVSDLIYEF |
| | (SEQ ID NO: 228) | MKTKDENLLEEAERLLEEVKR |
| | | (SEQ ID NO: 135)-X3 |
| 1Pro1 | MEKKIDKENVLQKIYEIMKELERLGHAEASMQVSDL | X1- |
| _CTS | IYEFMKTKDENLLEEAERLLEEVKRGGSSGPSTPPT | DKENVLQKIYEIMKELERLGHAEASMQVSDLIYEF |
| | PSPSTPPTPSPSPGGSSGDKENVLQKIYEIMKELER | MKTKDENLLEEAERLLEEVKR(SEQ ID NO: 135) |
| | LGHAEASMQVSDLIYEFMKTKDENLLEEAERLLEEV | -X2- |
| | KRGGSGSSGSAWSHPQFEKGGGSGGGSGGSAWSHPQ | DKENVLQKIYEIMKELERLGHAEASMQVSDLIYEF |
| | FEK | MKTKDENLLEEAERLLEEVKR |
| | (SEQ ID NO: 229) | (SEQ ID NO: 135)-X3 |
| 3GS3 | MEKKINLDELHMQMTDLVYEALHFAKDEEFQKHVFQ | X1- |
| _CTS | LFEKATKAYKNKDRQKLEKVVEELKELLERLLSGGS | NLDELHMQMTDLVYEALHFAKDEEFQKHVFQLFEK |
| | SGGGSSGGGSSGGGSSGGGSSGNLDELHMQMTDLVY | ATKAYKNKDRQKLEKVVEELKELLERLLS |
| | EALHFAKDEEFQKHVFQLFEKATKAYKNKDRQKLEK | (SEQ ID NO: 155) |
| | WEELKELLERLLSGGSGSSGSAWSHPQFEKGGGSG | -X2- |
| | GGSGGSAWSHPQFEK | NLDELHMQMTDLVYEALHFAKDEEFQKHVFQLFEK |
| | (SEQ ID NO: 230) | ATKAYKNKDRQKLEKVVEELKELLERLLS |
| | | (SEQ ID NO: 155)-X3 |
| 3Pro3 | MEKKINLDELHMQMTDLVYEALHFAKDEEFQKHVFQ | X1- |
| _CTS | LFEKATKAYKNKDRQKLEKVVEELKELLERLLSGGS | NLDELHMQMTDLVYEALHFAKDEEFQKHVFQLFEK |
| | SGPSTPPTPSPSTPPTPSPSPGGSSGNLDELHMQMT | ATKAYKNKDRQKLEKVVEELKELLERLLS |
| | DLVYEALHFAKDEEFQKHVFQLFEKATKAYKNKDRQ | (SEQ ID NO: 155) |
| | KLEKVVEELKELLERLLSGGSGSSGSAWSHPQFEKG | -X2- |
| | GGSGGGSGGSAWSHPQFEK | NLDELHMQMTDLVYEALHFAKDEEFQKHVFQLFEK |
| | (SEQ ID NO: 231) | ATKAYKNKDRQKLEKVVEELKELLERLLS |
| | | (SEQ ID NO: 155)-X3 |
| 1GS1G | MEKKISAWSHPQFEKGGSGSSGDKENVLQKIYEIMK | X1- |
| S1_NT | ELERLGHAEASMQVSDLIYEFMKTKDENLLEEAERL | DKENVLQKIYEIMKELERLGHAEASMQVSDLIYEF |
| S | LEEVKRGGSSGGGSSGGGSSGGGSSGGGSSGDKENV | MKTKDENLLEEAERLLEEVKR |
| | LQKIYEIMKELERLGHAEASMQVSDLIYEFMKTKDE | (SEQ ID NO: 135)-X2- |
| | NLLEEAERLLEEVKRGGSSGGGSSGGGSSGGGSSGG | DKENVLQKIYEIMKELERLGHAEASMQVSDLIYEF |
| | GSSGDKENVLQKIYEIMKELERLGHAEASMQVSDLI | MKTKDENLLEEAERLLEEVKR |
| | YEFMKTKDENLLEEAERLLEEVKR | (SEQ ID NO: 135)-X3- |
| | (SEQ ID NO: 232) | DKENVLQKIYEIMKELERLGHAEASMQVSDLIYEF |
| | | MKTKDENLLEEAERLLEEVKR |
| | | (SEQ ID NO: 135) |
| 1Pro1 | MEKKISAWSHPQFEKGGSGSSGDKENVLQKIYEIMK | X1- |
| Pro1_ | ELERLGHAEASMQVSDLIYEFMKTKDENLLEEAERL | DKENVLQKIYEIMKELERLGHAEASMQVSDLIYEF |
| NTS | LEEVKRGGSSGPSTPPTPSPSTPPTPSPSPGGSSGD | MKTKDENLLEEAERLLEEVKR |
| | KENVLQKIYEIMKELERLGHAEASMQVSDLIYEFMK | (SEQ ID NO: 135)-X2- |
| | TKDENLLEEAERLLEEVKRGGSSGPSTPPTPSPSTP | DKENVLQKIYEIMKELERLGHAEASMQVSDLIYEF |
| | PTPSPSPGGSSGDKENVLQKIYEIMKELERLGHAEA | MKTKDENLLEEAERLLEEVKR |
| | SMQVSDLIYEFMKTKDENLLEEAERLLEEVKR | (SEQ ID NO: 135)-X3- |
| | (SEQ ID NO: 233) | DKENVLQKIYEIMKELERLGHAEASMQVSDLIYEF |
| | | MKTKDENLLEEAERLLEEVKR |
| | | (SEQ ID NO: 135) |
| 3GS3G | MEKKISAWSHPQFEKGGSGSSGNLDELHMQMTDLVY | X1- |
| S3_NTS | EALHFAKDEEFQKHVFQLFEKATKAYKNKDRQKLEK | NLDELHMQMTDLVYEALHFAKDEEFQKHVFQLFEK |
| | VVEELKELLERLLSGGSSGGGSSGGGSSGGGSSGGG | ATKAYKNKDRQKLEKVVEELKELLERLLS |
| | SSGNLDELHMQMTDLVYEALHFAKDEEFQKHVFQLF | (SEQ ID NO: 155)-X2- |
| | EKATKAYKNKDRQKLEKVVEELKELLERLLSGGSSG | NLDELHMQMTDLVYEALHFAKDEEFQKHVFQLFEK |
| | GGSSGGGSSGGGSSGGGSSGNLDELHMQMTDLVYEA | ATKAYKNKDRQKLEKVVEELKELLERLLS |
| | LHFAKDEEFQKHVFQLFEKATKAYKNKDRQKLEKW | (SEQ ID NO: 155)-X3- |
| | EELKELLERLLS | NLDELHMQMTDLVYEALHFAKDEEFQKHVFQLFEK |
| | (SEQ ID NO: 234) | ATKAYKNKDRQKLEKVVEELKELLERLLS |
| | | (SEQ ID NO: 155) |
| 3Pro3 | MEKKISAWSHPQFEKGGSGSSGNLDELHMQMTDLVY | X1- |
| Pro3_ | EALHFAKDEEFQKHVFQLFEKATKAYKNKDRQKLEK | NLDELHMQMTDLVYEALHFAKDEEFQKHVFQLFEK |
| NTS | VVEELKELLERLLSGGSSGPSTPPTPSPSTPPTPSP | ATKAYKNKDRQKLEKVVEELKELLERLLS |
| | SPGGSSGNLDELHMQMTDLVYEALHFAKDEEFQKHV | (SEQ ID NO: 155)-X2- |
| | FQLFEKATKAYKNKDRQKLEKVVEELKELLERLLSG | NLDELHMQMTDLVYEALHFAKDEEFQKHVFQLFEK |
| | GSSGPSTPPTPSPSTPPTPSPSPGGSSGNLDELHMQ | ATKAYKNKDRQKLEKVVEELKELLERLLS |
| | MTDLVYEALHFAKDEEFQKHVFQLFEKATKAYKNKD | (SEQ ID NO: 155)-X3- |
| | RQKLEKVVEELKELLERLLS | NLDELHMQMTDLVYEALHFAKDEEFQKHVFQLFEK |
| | (SEQ ID NO: 235) | ATKAYKNKDRQKLEKVVEELKELLERLLS |
| | | (SEQ ID NO: 155) |
| 1GS1G | MEKKIDKENVLQKIYEIMKELERLGHAEASMQVSDL | X1- |
| S1_CT | IYEFMKTKDENLLEEAERLLEEVKRGGSSGGGSSGG | DKENVLQKIYEIMKELERLGHAEASMQVSDLIYEF |
| S | GSSGGGSSGGGSSGDKENVLQKIYEIMKELERLGHA | MKTKDENLLEEAERLLEEVKR |
| | EASMQVSDLIYEFMKTKDENLLEEAERLLEEVKRGG | (SEQ ID NO: 135)-X2- |
| | SSGGGSSGGGSSGGGSSGGGSSGDKENVLQKIYEIM | DKENVLQKIYEIMKELERLGHAEASMQVSDLIYEF |
| | KELERLGHAEASMQVSDLIYEFMKTKDENLLEEAER | MKTKDENLLEEAERLLEEVKR |
| | LLEEVKRGGSGSSGSAWSHPQFEK | (SEQ ID NO: 135)-X3- |
| | (SEQ ID NO: 236) | DKENVLQKIYEIMKELERLGHAEASMQVSDLIYEF |
| | | MKTKDENLLEEAERLLEEVKR |
| | | (SEQ ID NO: 135)-X4 |
| 1Pro1 | MEKKIDKENVLQKIYEIMKELERLGHAEASMQVSDL | X1- |
| Pro1_ | IYEFMKTKDENLLEEAERLLEEVKRGGSSGPSTPPT | DKENVLQKIYEIMKELERLGHAEASMQVSDLIYEF |
| CTS | PSPSTPPTPSPSPGGSSGDKENVLQKIYEIMKELER | MKTKDENLLEEAERLLEEVKR |
| | LGHAEASMQVSDLIYEFMKTKDENLLEEAERLLEEV | (SEQ ID NO: 135)-X2- |
| | KRGGSSGPSTPPTPSPSTPPTPSPSPGGSSGDKENV | DKENVLQKIYEIMKELERLGHAEASMQVSDLIYEF |
| | LQKIYEIMKELERLGHAEASMQVSDLIYEFMKTKDE | MKTKDENLLEEAERLLEEVKR |
| | NLLEEAERLLEEVKRGGSGSSGSAWSHPQFEK | (SEQ ID NO: 135)-X3- |
| | (SEQ ID NO: 237) | DKENVLQKIYEIMKELERLGHAEASMQVSDLIYEF |
| | | MKTKDENLLEEAERLLEEVKR |
| | | (SEQ ID NO: 135)-X4 |
| 3GS3G | MEKKINLDELHMQMTDLVYEALHFAKDEEFQKHVFQ | X1- |
| S3_CT | LFEKATKAYKNKDRQKLEKVVEELKELLERLLSGGS | NLDELHMQMTDLVYEALHFAKDEEFQKHVFQLFEK |
| S | SGGGSSGGGSSGGGSSGGGSSGNLDELHMQMTDLVY | ATKAYKNKDRQKLEKVVEELKELLERLLS |
| | EALHFAKDEEFQKHVFQLFEKATKAYKNKDRQKLEK | (SEQ ID NO: 155)-X2- |
| | VVEELKELLERLLSGGSSGGGSSGGGSSGGGSSGGG | NLDELHMQMTDLVYEALHFAKDEEFQKHVFQLFEK |
| | SSGNLDELHMQMTDLVYEALHFAKDEEFQKHVFQLF | ATKAYKNKDRQKLEKVVEELKELLERLLS |
| | EKATKAYKNKDRQKLEKVVEELKELLERLLSGGSGS | (SEQ ID NO: 155)-X3- |
| | SGSAWSHPQFEK(SEQ ID NO: 238) | NLDELHMQMTDLVYEALHFAKDEEFQKHVFQLFEK |
| | | ATKAYKNKDRQKLEKVVEELKELLERLLS |
| | | (SEQ ID NO: 155)-X4 |
| | | X1- |
| 3Pro3 | MEKKINLDELHMQMTDLVYEALHFAKDEEFQKHVFQ | NLDELHMQMTDLVYEALHFAKDEEFQKHVFQLFEK |
| Pro3_ | LFEKATKAYKNKDRQKLEKVVEELKELLERLLSGGS | ATKAYKNKDRQKLEKVVEELKELLERLLS |
| CTS | SGPSTPPTPSPSTPPTPSPSPGGSSGNLDELHMQMT | (SEQ ID NO: 155)-X2- |
| | DLVYEALHFAKDEEFQKHVFQLFEKATKAYKNKDRQ | NLDELHMQMTDLVYEALHFAKDEEFQKHVFQLFEK |
| | KLEKVVEELKELLERLLSGGSSGPSTPPTPSPSTPP | ATKAYKNKDRQKLEKVVEELKELLERLLS |
| | TPSPSPGGSSGNLDELHMQMTDLVYEALHFAKDEEF | (SEQ ID NO: 155)-X3- |
| | QKHVFQLFEKATKAYKNKDRQKLEKVVEELKELLER | NLDELHMQMTDLVYEALHFAKDEEFQKHVFQLFEK |
| | LLSGGSGSSGSAWSHPQFEK(SEQ ID NO: 239) | ATKAYKNKDRQKLEKVVEELKELLERLLS |
| | | (SEQ ID NO: 155)-X4 |
| 1GS3_ | MEKKISAWSHPQFEKGGGSGGGSGGSAWSHPQFEKG | X1- |
| NTS | GSGSSGDKENVLQKIYEIMKELERLGHAEASMQVSD | DKENVLQKIYEIMKELERLGHAEASMQVSDLIYEF |
| | LIYEFMKTKDENLLEEAERLLEEVKRGGSSGGGSSG | MKTKDENLLEEAERLLEEVKR(SEQ ID NO: 135) |
| | GGSSGGGSSGGGSSGNLDELHMQMTDLVYEALHFAK | -X2- |
| | DEEFQKHVFQLFEKATKAYKNKDRQKLEKVVEELKE | NLDELHMQMTDLVYEALHFAKDEEFQKHVFQLFEK |
| | LLERLLS(SEQ ID NO: 240) | ATKAYKNKDRQKLEKVVEELKELLERLLS |
| | | (SEQ ID NO: 155) |
| 1Pro3_ | MEKKISAWSHPQFEKGGGSGGGSGGSAWSHPQFEKG | X1- |
| NTS | GSGSSGDKENVLQKIYEIMKELERLGHAEASMQVSD | DKENVLQKIYEIMKELERLGHAEASMQVSDLIYEF |
| | LIYEFMKTKDENLLEEAERLLEEVKRGGSSGPSTPP | MKTKDENLLEEAERLLEEVKR(SEQ ID NO: 135) |
| | TPSPSTPPTPSPSPGGSSGNLDELHMQMTDLVYEAL | X-2- |
| | HFAKDEEFQKHVFQLFEKATKAYKNKDRQKLEKWE | NLDELHMQMTDLVYEALHFAKDEEFQKHVFQLFEK |
| | ELKELLERLLS(SEQ ID NO: 241) | ATKAYKNKDRQKLEKVVEELKELLERLLS |
| | | (SEQ ID NO: 155) |
| 3GS1_ | MEKKISAWSHPQFEKGGGSGGGSGGSAWSHPQFEKG | X1- |
| NTS | GSGSSGNLDELHMQMTDLVYEALHFAKDEEFQKHVF | NLDELHMQMTDLVYEALHFAKDEEFQKHVFQLFEK |
| | QLFEKATKAYKNKDRQKLEKVVEELKELLERLLSGG | ATKAYKNKDRQKLEKVVEELKELLERLLS |
| | SSGGGSSGGGSSGGGSSGGGSSGDKENVLQKIYEIM | (SEQ ID NO: 155)-X2- |
| | KELERLGHAEASMQVSDLIYEFMKTKDENLLEEAER | DKENVLQKIYEIMKELERLGHAEASMQVSDLIYEF |
| | LLEEVKR(SEQ ID NO: 242) | MKTKDENLLEEAERLLEEVKR(SEQ ID NO: 135) |
| 3Pro1_ | MEKKISAWSHPQFEKGGGSGGGSGGSAWSHPQFEKG | X1- |
| NTS | GSGSSGNLDELHMQMTDLVYEALHFAKDEEFQKHVF | NLDELHMQMTDLVYEALHFAKDEEFQKHVFQLFEK |
| | QLFEKATKAYKNKDRQKLEKVVEELKELLERLLSGG | ATKAYKNKDRQKLEKVVEELKELLERLLS |
| | SSGPSTPPTPSPSTPPTPSPSPGGSSGDKENVLQKI | (SEQ ID NO: 155)-X2- |
| | YEIMKELERLGHAEASMQVSDLIYEFMKTKDENLLE | DKENVLQKIYEIMKELERLGHAEASMQVSDLIYEF |
| | EAERLLEEVKR(SEQ ID NO: 243) | MKTKDENLLEEAERLLEEVKR(SEQ ID NO: 135) |
| 1GS3_ | MEKKIDKENVLQKIYEIMKELERLGHAEASMQVSDL | X1- |
| CTS | IYEFMKTKDENLLEEAERLLEEVKRGGSSGGGSSGG | DKENVLQKIYEIMKELERLGHAEASMQVSDLIYEF |
| | GSSGGGSSGGGSSGNLDELHMQMTDLVYEALHFAKD | MKTKDENLLEEAERLLEEVKR(SEQ ID NO: 135)- |
| | EEFQKHVFQLFEKATKAYKNKDRQKLEKVVEELKEL | X2- |
| | LERLLSGGSGSSGSAWSHPQFEKGGGSGGGSGGSAW | NLDELHMQMTDLVYEALHFAKDEEFQKHVFQLFEK |
| | SHPQFEK(SEQ ID NO: 244) | ATKAYKNKDRQKLEKVVEELKELLERLLS |
| | | (SEQ ID NO: 155)-X3 |
| 1Pro3_ | MEKKIDKENVLQKIYEIMKELERLGHAEASMQVSDL | X1- |
| CTS | IYEFMKTKDENLLEEAERLLEEVKRGGSSGPSTPPT | DKENVLQKIYEIMKELERLGHAEASMQVSDLIYEF |
| | PSPSTPPTPSPSPGGSSGNLDELHMQMTDLVYEALH | MKTKDENLLEEAERLLEEVKR(SEQ ID NO: 135)- |
| | FAKDEEFQKHVFQLFEKATKAYKNKDRQKLEKVVEE | X2- |
| | LKELLERLLSGGSGSSGSAWSHPQFEKGGGSGGGSG | NLDELHMQMTDLVYEALHFAKDEEFQKHVFQLFEK |
| | GSAWSHPQFEK(SEQ ID NO: 245) | ATKAYKNKDRQKLEKVVEELKELLERLLS |
| | | (SEQ ID NO: 155)-X3 |
| 3GS1_ | MEKKINLDELHMQMTDLVYEALHFAKDEEFQKHVFQ | X1- |
| CTS | LFEKATKAYKNKDRQKLEKVVEELKELLERLLSGGS | NLDELHMQMTDLVYEALHFAKDEEFQKHVFQLFEK |
| | SGGGSSGGGSSGGGSSGGGSSGDKENVLQKIYEIMK | ATKAYKNKDRQKLEKVVEELKELLERLLS |
| | ELERLGHAEASMQVSDLIYEFMKTKDENLLEEAERL | (SEQ ID NO: 155)-X2- |
| | LEEVKRGGSGSSGSAWSHPQFEKGGGSGGGSGGSAW | DKENVLQKIYEIMKELERLGHAEASMQVSDLIYEF |
| | SHPQFEK | MKTKDENLLEEAERLLEEVKR |
| | (SEQ ID NO: 246) | (SEQ ID NO: 135)-X3 |
| 3Pro1 | MEKKINLDELHMQMTDLVYEALHFAKDEEFQKHVFQ | X1- |
| _CTS | LFEKATKAYKNKDRQKLEKVVEELKELLERLLSGGS | NLDELHMQMTDLVYEALHFAKDEEFQKHVFQLFEK |
| | SGPSTPPTPSPSTPPTPSPSPGGSSGDKENVLQKIY | ATKAYKNKDRQKLEKVVEELKELLERLLS |
| | EIMKELERLGHAEASMQVSDLIYEFMKTKDENLLEE | (SEQ ID NO: 155)-X2- |
| | AERLLEEVKRGGSGSSGSAWSHPQFEKGGGSGGGSG | DKENVLQKIYEIMKELERLGHAEASMQVSDLIYEF |
| | GSAWSHPQFEK | MKTKDENLLEEAERLLEEVKR |
| | (SEQ ID NO: 247) | (SEQ ID NO: 135)-X3 |
| 3- | MEKKISAWSHPQFEKGGGSGGGSGGSAWSHPQFEKG | X1- |
| GS10- | GSGSSGNLDELHMQMTDLVYEALHFAKDEEFQKHVF | NLDELHMQMTDLVYEALHFAKDEEFQKHVFQLFEK |
| 1- | QLFEKATKAYKNKDRQKLEKVVEELKELLERLLSGG | ATKAYKNKDRQKLEKVVEELKELLERLLS |
| L_NTS | GSGGGSGGDKENVLQKIYEIMKELERLGHAEASMQV | (SEQ ID NO: 155)-X2- |
| | SDLIYEFMKTKDENLLEEAERLLEEVKR | DKENVLQKIYEIMKELERLGHAEASMQVSDLIYEF |
| | (SEQ ID NO: 248) | MKTKDENLLEEAERLLEEVKR |
| | | (SEQ ID NO: 135) |
| 3- | MEKKISAWSHPQFEKGGGSGGGSGGSAWSHPQFEKG | X1- |
| GS10- | GSGSSGNLDELHMQMTDLVYEALHFAKDEEFQKHVF | )NLDELHMQMTDLVYEALHFAKDEEFQKHVFQLFE |
| 1_NTS | QLFEKATKAYKNKDRQKLEKVVEELKELLERLLSGG | KATKAYKNKDRQKLEKVVEELKELLERLLS |
| | SSGGGSSGDKENVLQKIYEIMKELERLGHAEASMQV | (SEQ ID NO: 155)-X2- |
| | SDLIYEFMKTKDENLLEEAERLLEEVKR | DKENVLQKIYEIMKELERLGHAEASMQVSDLIYEF |
| | (SEQ ID NO: 249) | MKTKDENLLEEAERLLEEVKR |
| | | (SEQ ID NO: 135) |
| 3- | MEKKISAWSHPQFEKGGGSGGGSGGSAWSHPQFEKG | X1- |
| GS15- | GSGSSGNLDELHMQMTDLVYEALHFAKDEEFQKHVF | NLDELHMQMTDLVYEALHFAKDEEFQKHVFQLFEK |
| 1_NTS | QLFEKATKAYKNKDRQKLEKVVEELKELLERLLSGG | ATKAYKNKDRQKLEKVVEELKELLERLLS |
| | SSGGGSSGGGSSGDKENVLQKIYEIMKELERLGHAE | (SEQ ID NO: 155)-X2- |
| | ASMQVSDLIYEFMKTKDENLLEEAERLLEEVKR | DKENVLQKIYEIMKELERLGHAEASMQVSDLIYEF |
| | (SEQ ID NO: 250) | MKTKDENLLEEAERLLEEVKR |
| | | (SEQ ID NO: 135) |
| 3- | MEKKISAWSHPQFEKGGGSGGGSGGSAWSHPQFEKG | X1- |
| GS20- | GSGSSGNLDELHMQMTDLVYEALHFAKDEEFQKHVF | NLDELHMQMTDLVYEALHFAKDEEFQKHVFQLFEK |
| 1_NTS | QLFEKATKAYKNKDRQKLEKVVEELKELLERLLSGG | ATKAYKNKDRQKLEKVVEELKELLERLLS |
| | SSGGGSSGGGSSGGGSSGDKENVLQKIYEIMKELER | (SEQ ID NO: 155)-X2- |
| | LGHAEASMQVSDLIYEFMKTKDENLLEEAERLLEEV | DKENVLQKIYEIMKELERLGHAEASMQVSDLIYEF |
| | KR | MKTKDENLLEEAERLLEEVKR |
| | (SEQ ID NO: 251) | (SEQ ID NO: 135) |
| 1- | MEKKISAWSHPQFEKGGGSGGGSGGSAWSHPQFEKG | X1- |
| GS10- | GSGSSGDKENVLQKIYEIMKELERLGHAEASMQVSD | DKENVLQKIYEIMKELERLGHAEASMQVSDLIYEF |
| 1_NTS | LIYEFMKTKDENLLEEAERLLEEVKRGGSSGGGSSG | MKTKDENLLEEAERLLEEVKR |
| | DKENVLQKIYEIMKELERLGHAEASMQVSDLIYEFM | (SEQ ID NO: 135)-X2- |
| | KTKDENLLEEAERLLEEVKR | DKENVLQKIYEIMKELERLGHAEASMQVSDLIYEF |
| | (SEQ ID NO: 252) | MKTKDENLLEEAERLLEEVKR |
| | | (SEQ ID NO: 135) |
| 1- | MEKKISAWSHPQFEKGGGSGGGSGGSAWSHPQFEKG | X1- |
| GS15- | GSGSSGDKENVLQKIYEIMKELERLGHAEASMQVSD | DKENVLQKIYEIMKELERLGHAEASMQVSDLIYEF |
| 1_NTS | LIYEFMKTKDENLLEEAERLLEEVKRGGSSGGGSSG | MKTKDENLLEEAERLLEEVKR |
| | GGSSGDKENVLQKIYEIMKELERLGHAEASMQVSDL | (SEQ ID NO: 135)-X2- |
| | IYEFMKTKDENLLEEAERLLEEVKR | DKENVLQKIYEIMKELERLGHAEASMQVSDLIYEF |
| | (SEQ ID NO: 253) | MKTKDENLLEEAERLLEEVKR |
| | | (SEQ ID NO: 135) |
| 1- | MEKKISAWSHPQFEKGGGSGGGSGGSAWSHPQFEKG | X1-DKENVLQKIYEIMKELERLGHAEASMQVSDLIYEF |
| GS20- | GSGSSGDKENVLQKIYEIMKELERLGHAEASMQVSD | MKTKDENLLEEAERLLEEVKR |
| 1_NTS | LIYEFMKTKDENLLEEAERLLEEVKRGGSSGGGSSG | (SEQ ID NO: 135)-X2- |
| | GGSSGGGSSGDKENVLQKIYEIMKELERLGHAEASM | DKENVLQKIYEIMKELERLGHAEASMQVSDLIYEF |
| | QVSDLIYEFMKTKDE1NLLEEAERLLEEVKR | MKTKDENLLEEAERLLEEVKR |
| | (SEQ ID NO: 254) | (SEQ ID NO: 135) |
| 2- | MSKIKSAWSHPQFEKGGGSGGGSGGSAWSHPQFEKG | X1- |
| 1_ | GSGSSGELEEQVMHVLDQVSELAHELLHKLTGEELE | ELEEQVMHVLDQVSELAHELLHKLTGEELERAAYF |
| GS10 | RAAYFNWWATEMMLELIKSDDEREIREIEEEARRIL | NWWATEMMLELIKSDDEREIREIEEEARRILEHLE |
| | EHLEELARKGGSSGGGSSGDKENVLQKIYEIMKELE | ELARK |
| | | (SEQ ID NO: 101)-X2- |
| | RLGHAEASMQVSDLIYEFMKTKDERLLEEAERLLEE | DKENVLQKIYEIMKELERLGHAEASMQVSDLIYEF |
| | VKR(SEQ ID NO: 255) | MKTKDERLLEEAERLLEEVKR |
| | | (SEQ ID NO: 125) |
| 2- | MSKIKSAWSHPQFEKGGGSGGGSGGSAWSHPQFEKG | X1- |
| 1_ | GSGSSGELEEQVMHVLDQVSELAHELLHKLTGEELE | ELEEQVMHVLDQVSELAHELLHKLTGEELERAAYF |
| GS15 | RAAYFNWWATEMMLELIKSDDEREIREIEEEARRIL | NWWATEMMLELIKSDDEREIREIEEEARRILEHLE |
| | EHLEELARKGGSSGGGSSGGGSSGDKENVLQKIYEI | ELARK |
| | MKELERLGHAEASMQVSDLIYEFMKTKDERLLEEAE | (SEQ ID NO: 101)- |
| | RLLEEVKR(SEQ ID NO: 256) | X2-DKENVLQKIYEIMKELERLGHAEASMQVSDLIYEF |
| | | MKTKDERLLEEAERLLEEVKR |
| | | (SEQ ID NO: 125) |
| 2- | MSKIKSAWSHPQFEKGGGSGGGSGGSAWSHPQFEKG | X1- |
| 1_ | GSGSSGELEEQVMHVLDQVSELAHELLHKLTGEELE | ELEEQVMHVLDQVSELAHELLHKLTGEELERAAYF |
| GS20 | RAAYFNWWATEMMLELIKSDDEREIREIEEEARRIL | NWWATEMMLELIKSDDEREIREIEEEARRILEHLE |
| | EHLEELARKGGSSGGGSSGGGSSGGGSSGDKENVLQ | ELARK |
| | KIYEIMKELERLGHAEASMQVSDLIYEFMKTKDERL | (SEQ ID NO: 101)- |
| | LEEAERLLEEVKR | X2-DKENVLQKIYEIMKELERLGHAEASMQVSDLIYEF |
| | (SEQ ID NO: 257) | MKTKDERLLEEAERLLEEVKR |
| | | (SEQ ID NO: 125) |
| 2-2- | MSKIKSAWSHPQFEKGGGSGGGSGGSAWSHPQFEKG | X1- |
| 1_ | GSGSSGELEEQVMHVLDQVSELAHELLHKLTGEELE | ELEEQVMHVLDQVSELAHELLHKLTGEELERAAYF |
| GS10 | RAAYFNWWATEMMLELIKSDDEREIREIEEEARRIL | NWWATEMMLELIKSDDEREIREIEEEARRILEHLE |
| | EHLEELARKGGSSGGGSSGELEEQVMHVLDQVSELA | ELARK(SEQ ID NO: 101)- |
| | HELLHKLTGEELERAAYFNWWATEMMLELIKSDDER | X2-ELEEQVMHVLDQVSELAHELLHKLTGEELERAAYF |
| | ElREIEEEARRILEHLEELARKGGSSGGGSSGDKEN | NWWATEMMLELIKSDDEREIREIEEEARRILEHLE |
| | VLQKIYEIMKELERLGHAEASMQVSDLIYEFMKTKD | ELARK(SEQ ID NO: 101)- |
| | ERLLEEAERLLEEVKR(SEQ ID NO: 258) | X3 |
| 2-2- | MSKIKSAWSHPQFEKGGGSGGGSGGSAWSHPQFEKG | X1- |
| 1_ | GSGSSGELEEQVMHVLDQVSELAHELLHKLTGEELE | ELEEQVMHVLDQVSELAHELLHKLTGEELERAAYF |
| GS15 | RAAYFNWWATEMMLELIKSDDEREIREIEEEARRIL | NWWATEMMLELIKSDDEREIREIEEEARRILEHLE |
| | EHLEELARKGGSSGGGSSGGGSSGELEEQVMHVLDQ | ELARK(SEQ ID NO: 101)- |
| | VSELAHELLHKLTGEELERAAYFNWWATEMMLELIK | X2-ELEEQVMHVLDQVSELAHELLHKLTGEELERAAYF |
| | SDDEREIREIEEEARRILEHLEELARKGGSSGGGSS | NWWATEMMLELIKSDDEREIREIEEEARRILEHLE |
| | GGGSSGDKENVLQKIYEIMKELERLGHAEASMQVSD | ELARK(SEQ ID NO: 101)- |
| | LIYEFMKTKDERLLEEAERLLEEVKR | X3 |
| | (SEQ ID NO: 259) | |
| 2-2- | MSKIKSAWSHPQFEKGGGSGGGSGGSAWSHPQFEKG | X1- |
| 1_ | GSGSSGELEEQVMHVLDQVSELAHELLHKLTGEELE | ELEEQVMHVLDQVSELAHELLHKLTGEELERAAYF |
| GS20 | RAAYFNWWATEMMLELIKSDDEREIREIEEEARRIL | NWWATEMMLELIKSDDEREIREIEEEARRILEHLE |
| | EHLEELARKGGSSGGGSSGGGSSGGGSSGELEEQVM | ELARK(SEQ ID NO: 101)- |
| | HVLDQVSELAHELLHKLTGEELERAAYFNWWATEMM | X2-ELEEQVMHVLDQVSELAHELLHKLTGEELERAAYF |
| | LELIKSDDEREIREIEEEARRILEHLEELARKGGSS | NWWATEMMLELIKSDDEREIREIEEEARRILEHLE |
| | GGGSSGGGSSGGGSSGDKENVLQKIYEIMKELERLG | ELARK(SEQ ID NO: 101)- |
| | HAEASMQVSDLIYEFMKTKDERLLEEAERLLEEVKR | X3 |
| | (SEQ ID NO: 260) | |
| 2-2- | MSKIKSAWSHPQFEKGGGSGGGSGGSAWSHPQFEKG | X1- |
| 1_ | GSGSSGELEEQVMHVLDQVSELAHELLHKLTGEELE | ELEEQVMHVLDQVSELAHELLHKLTGEELERAAYF |
| GS10 | RAAYFNWWATEMMLELIKSDDEREIREIEEEARRIL | NWWATEMMLELIKSDDEREIREIEEEARRILEHLE |
| | EHLEELARKGGSSGGGSSGELEEQVMHVLDQVSELA | ELARK(SEQ ID NO: 101)- |
| | HELLHKLTGEELERAAYFNWWATEMMLELIKSDDER | X2-ELEEQVMHVLDQVSELAHELLHKLTGEELERAAYF |
| | EIREIEEEARRILEHLEELARK(SEQ ID NO: | NWWATEMMLELIKSDDEREIREIEEEARRILEHLE |
| | 261) | ELARK(SEQ ID NO: 101) |
| 2- | MSKIKSAWSHPQFEKGGGSGGGSGGSAWSHPQFEKG | X1- |
| 2_ | GSGSSGELEEQVMHVLDQVSELAHELLHKLTGEELE | ELEEQVMHVLDQVSELAHELLHKLTGEELERAAYF |
| GS15 | RAAYFNWWATEMMLELIKSDDEREIREIEEEARRIL | NWWATEMMLELIKSDDEREIREIEEEARRILEHLE |
| | EHLEELARKGGSSGGGSSGGGSSGELEEQVMHVLDQ | ELARK(SEQ ID NO: 101)- |
| | VSELAHELLHKLTGEELERAAYFNWWATEMMLELIK | X2-ELEEQVMHVLDQVSELAHELLHKLTGEELERAAYF |
| | SDDEREIREIEEEARRILEHLEELARK | NWWATEMMLELIKSDDEREIREIEEEARRILEHLE |
| | (SEQ ID NO: 262) | ELARK(SEQ ID NO: 101) |
| 2- | MSKIKSAWSHPQFEKGGGSGGGSGGSAWSHPQFEKG | X1- |
| 2_ | GSGSSGELEEQVMHVLDQVSELAHELLHKLTGEELE | ELEEQVMHVLDQVSELAHELLHKLTGEELERAAYF |
| GS10 | RAAYFNWWATEMMLELIKSDDEREIREIEEEARRIL | NWWATEMMLELIKSDDEREIREIEEEARRILEHLE |
| | EHLEELARKGGSSGGGSSGGGSSGGGSSGELEEQVM | ELARK(SEQ ID NO: 101)- |
| | HVLDQVSELAHELLHKLTGEELERAAYFNWWATEMM | X2-ELEEQVMHVLDQVSELAHELLHKLTGEELERAAYF |
| | LELIKSDDEREIREIEEEARRILEHLEELARK(SEQ | NWWATEMMLELIKSDDEREIREIEEEARRILEHLE |
| | ID NO: 263) | ELARK(SEQ ID NO: 101) |
| 2-2-2_ | MSKIKSAWSHPQFEKGGGSGGGSGGSAWSHPQFEKG | X1-ELEEQVMHVLDQVSELAHELLHKLTGEELERAA |
| GS10 | GSGSSGELEEQVMHVLDQVSELAHELLHKLTGEELE | YFNWWATEMMLELIKSDDEREIREIEEEARRILEHL |
| | RAAYFNWWATEMMLELIKSDDEREIREIEEEARRIL | EELARK(SEQ ID NO: 101)-X2-ELEEQVMHVL |
| | EHLEELARKGGSSGGGSSGELEEQVMHVLDQVSELA | DQVSELAHELLHKLTGEELERAAYFNWWATEMMLEL |
| | HELLHKLTGEELERAAYFNWWATEMMLELIKSDDER | IKSDDEREIREIEEEARRILEHLEELARK(SEQ ID |
| | EIREIEEEARRILEHLEELARKGGSSGGGSSGELEE | NO: 101)-X3-ELEEQVMHVLDQVSELAHELLHK |
| | QVMHVLDQVSELAHELLHKLTGEELERAAYFNWWAT | LTGEELERAAYFNWWATEMMLELIKSDDEREIREIE |
| | EMMLELIKSDDEREIREIEEEARRILEHLEELARK | EEARRILEHLEELARK(SEQ ID NO: 101) |
| | (SEQ ID NO: 264) | |
| 2-2-2_ | MSKIKSAWSHPQFEKGGGSGGGSGGSAWSHPQFEKG | X1-ELEEQVMHVLDQVSELAHELLHKLTGEELERAA |
| GS15 | GSGSSGELEEQVMHVLDQVSELAHELLHKLTGEELE | YFNWWATEMMLELIKSDDEREIREIEEEARRILEHL |
| | RAAYFNWWATEMMLELIKSDDEREIREIEEEIARR | EELARK(SEQ ID NO: 101)-X2-ELEEQVMHVL |
| | ILEHLEELARKGGSSGGGSSGGGSSGELEEQVMHVL | DQVSELAHELLHKLTGEELERAAYFNWWATEMMLEL |
| | DQVSELAHELLHKLTGEELERAAYFNWWATEMMLEL | IKSDDEREIREIEEEARRILEHLEELARK(SEQ ID |
| | IKSDDEREIREIEEEARRILEHLEELARKGGSSGGG | NO: 101)-X3-ELEEQVMHVLDQVSELAHELLHK |
| | SSGGGSSGELEEQVMHVLDQVSELAHELLHKLTGEE | LTGEELERAAYFNWWATEMMLELIKSDDEREIREIE |
| | LERAAYFNWWATEMMLELIKSDDEREIREIEEEARR | EEARRILEHLEELARK(SEQ ID NO: 101) |
| | ILEHLEELARK(SEQ ID NO: 265) | |
| 2-2-2_ | MSKIKSAWSHPQFEKGGGSGGGSGGSAWSHPQFEKG | X1-ELEEQVMHVLDQVSELAHELLHKLTGEELERAA |
| GS20 | GSGSSGELEEQVMHVLDQVSELAHELLHKLTGEELE | YFNWWATEMMLELIKSDDEREIREIEEEARRILEHL |
| | RAAYFNWWATEMMLELIKSDDEREIREIEEEARRIL | EELARK(SEQ ID NO: 101)-X2-ELEEQVMHVL |
| | EHLEELARKGGSSGGGSSGGGSSGGGSSGELEEQVM | DQVSELAHELLHKLTGEELERAAYFNWWATEMMLEL |
| | HVLDQVSELAHELLHKLTGEELERAAYFNWWATEMM | IKSDDEREIREIEEEARRILEHLEELARK(SEQ ID |
| | LELIKSDDEREIREIEEEARRILEHLEELARKGGSS | NO: 101)-X3-ELEEQVMHVLDQVSELAHELLHK |
| | GGGSSGGGSSGGGSSGELEEQVMHVLDQVSELAHEL | LTGEELERAAYFNWWATEMMLELIKSDDEREIREIE |
| | LHKLTGEELERAAYFNWWATEMMLELIKSDDEREIR | EEARRILEHLEELARK(SEQ ID NO: 101) |
| | ElEEEIARRILEHLEELARK(SEQ ID NO: 266) | |
| AHB2- | MEKKISAWSHPQFEKGGGSGGGSGGSAWSHPQFEKG | X1-ELEEQVMHVLDQVSELAHELLHKLTGEELERAA |
| AHB2_ | GSGSSGELEEQVMHVLDQVSELAHELLHKLTGEELE | YFNWWATEMMLELIKSDDEREIREIEEEARRILEHL |
| PAS | RAAYFNWWATEMMLELIKSDDEREIREIEEEARRIL | EELARK(SEQ ID NO: 101)-X2-ELEEQVMHVL |
| | EHLEELARKGGASPAAPAPASPAAPAPSAPAGGELE | DQVSELAHELLHKLTGEELERAAYFNWWATEMMLEL |
| | EQVMHVLDQVSELAHELLHKLTGEELERAAYFNWWA | IKSDDEREIREIEEEARRILEHLEELARK(SEQ ID |
| | TEMMLELIKSDDEREIREIEEEIARRILEHLEELAR | NO: 101) |
| | K(SEQ ID NO: 267) | |
| LCB3- | MEKKISAWSHPQFEKGGGSGGGSGGSAWSHPQFEKG | X1-NLDELHMQMTDLVYEALHFAKDEEFQKHVFQLF |
| LCB1_ | GSGSSGNLDELHMQMTDLVYEALHFAKDEEFQKHVF | EKATKAYKNKDRQKLEKVVEELKELLERLLS(SEQ |
| PAS | QLFEKATKAYKNKDRQKLEKVVEELKELLERLLSGG | ID NO: 155)-X2-DKENVLQKIYEIMKELERLGH |
| | ASPAAPAPASPAAPAPSAPAGGDKENVLQKIYEIMK | AEASMQVSDLIYEFMKTKDERLLEEAERLLEEVKR( |
| | ELERLGHAEASMQVSDLIYEFMKTKDERLLEEAERL | SEQ ID NO: 125) |
| | LEEVKR(SEQ ID NO: 268) | |
| AHB2- | MEKKISAWSHPQFEKGGGSGGGSGGSAWSHPQFEKG | X1-ELEEQVMHVLDQVSELAHELLHKLTGEELERAA |
| LCB1_ | GSGSSGELEEQVMHVLDQVSELAHELLHKLTGEELE | YFNWWATEMMLELIKSDDEREIREIEEEARRILEHL |
| PAS | RAAYFNWWATEMMLELIKSDDEREIREIEEEARRIL | EELARK(SEQ ID NO: 101)-X2-DKENVLQKIY |
| | EHLEELARKGGASPAAPAPASPAAPAPSAPAGGDKE | EIMKELERLGHAEASMQVSDLIYEFMKTKDERLLEE |
| | NVLQKIYEIMKELERLGHAEASMQVSDLIYEFMKTK | AERLLEEVKR(SEQ ID NO: 125) |
| | DERLLEEAERLLEEVKR(SEQ ID NO: 269) | |
| AHB2_ | MEKKISAWSHPQFEKGGGSGGGSGGSAWSHPQFEKG | X1-ELEEQVMHVLDQVSELAHELLHKLTGEELERAA |
| 3x_ | GSGSSGELEEQVMHVLDQVSELAHELLHKLTGEELE | YFNWWATEMMLELIKSDDEREIREIEEEARRILEHL |
| AS | RAAYFNWWATEMMLELIKSDDEREIREIEEEARRIL | EELARK(SEQ ID NO: 101)-X2-ELEEQVMHVL |
| | EHLEELARKGGASPAAPAPASPAAPAPSAPAGGELE | DQVSELAHELLHKLTGEELERAAYFNWWATEMMLEL |
| | EQVMHVLDQVSELAHELLHKLTGEELERAAYFNWWA | IKSDDEREIREIEEEIARRILEHLEELARK(SEQ I |
| | TEMMLELIKSDDEREIREIEEEARRILEHLEELARK | D NO: 101)-X3-ELEEQVMHVLDQVSELAHELLH |
| | GGASPAAPAPASPAAPAPSAPAGGELEEQVMHVLDQ | KLTGEELERAAYFNWWATEMMLELIKSDDEREIREI |
| | VSELAHELLHKLTGEELERAAYFNWWATEMMLELIK | EEEARRILEHLEELARK(SEQ ID NO: 101) |
| | SDDEREIREIEEEARRILEHLEELARK | |
| | (SEQ ID NO: 270) | |
| 3-2-1_ | MEKKISAWSHPQFEKGGGSGGGSGGSAWSHPQFEKG | X1-NLDELHMQMTDLVYEALHFAKDEEFQKHVFQLF |
| PAS | GSGSSGNLDELHMQMTDLVYEALHFAKDEEFQKHVF | EKATKAYKNKDRQKLEKVVEELKELLERLLS(SEQ |
| | QLFEKATKAYKNKDRQKLEKVVEELKELLERLLSGG | ID NO: 155)-X2- |
| | ASPAAPAPASPAAPAPSAPAGGELEEQVMHVLDQVS | ELEEQVMHVLDQVSELAHELL |
| | ELAHELLHKLTGEELERAAYFNWWATEMMLELIKSD | HKLTGEELERAAYFNWWATEMMLELIKSDDEREIRE |
| | DEREIREIEEEARRILEHLEELARKGGASPAAPAPA | IEEEARRILEHLEELARK |
| | SPAAPAPSAPAGGDKENVLQKIYEIMKELERLGHAE | (SEQ ID NO: 101)-X3 |
| | ASMQVSDLIYEFMKTKDERLLEEAERLLEEVKR | |
| | (SEQ ID NO: 271) | |
| 2-3- | MEKKISAWSHPQFEKGGGSGGGSGGSAWSHPQFEKG | X1- |
| 1_ | GSGSSGELEEQVMHVLDQVSELAHELLHKLTGEELE | ELEEQVMHVLDQVSELAHELLHKLTGEELERA |
| PAS | RAAYFNWWATEMMLELIKSDDEREIREIEEEARRIL | AYFNWWATEMMLELIKSDDEREIREIEEEARRILEH |
| | EHLEELARKGGASPAAPAPASPAAPAPSAPAGGNLD | LEELARK |
| | ELHMQMTDLVYEALHFAKDEEFQKHVFQLFEKATKA | (SEQ ID NO: 101)-X2- |
| | YKNKDRQKLEKVVEELKELLERLLSGGASPAAPAPA | NLDELHMQ |
| | SPAAPAPSAPAGGDKENVLQKIYEIMKELERLGHAE | MTDLVYEALHFAKDEEFQKHVFQLFEKATKAYKNKD |
| | ASMQVSDLIYEFMKTKDERLLEEAERLLEEVKR | RQKLEKVVEELKELLERLLS |
| | (SEQ ID NO: 272) | (SEQ ID NO: 155)-X3 |
| 1-1-1_ | MEKKISAWSHPQFEKGGGSGGGSGGSAWSHPQFEKG | X1- |
| PAS | GSGSSGDKENVLQKIYEIMKELERLGHAEASMQVSD | DKENVLQKIYEIMKELERLGHAEASMQVSDLI |
| 24 | LIYEFMKTKDENLLEEAERLLEEVKRGGASPAAPAP | YEFMKTKDENLLEEAERLLEEVKR |
| | ASPAAPAPSAPAGGDKENVLQKIYEIMKELERLGHA | (SEQ ID NO: 135)-X2- |
| | EASMQVSDLIYEFMKTKDENLLEEAERLLEEVKRGG | DKENVLQKIYEIMKELERLGHAEASMQ |
| | ASPAAPAPASPAAPAPSAPAGGDKENVLQKIYEIMK | VSDLIYEFMKTKDENLLEEAERLLEEVKR |
| | ELERLGHAEASMQVSDLIYEFMKTKDENLLEEAERL | (SEQ ID NO: 135)-X3- |
| | LEEVKR | DKENVLQKIYEIMKELERLGHA |
| | (SEQ ID NO: 273) | EASMQVSDLIYEFMKTKDENLLEEAERLLEEVKR |
| | | (SEQ ID NO: 135) |
| 2-2-2_ | MEKKISAWSHPQFEKGGGSGGGSGGSAWSHPQFEKG | X1- |
| PAS | GSGSSGELEEQVMHVLDQVSELAHELLHKLTGEELE | ELEEQVMHVLDQVSELAHELLHKLTGEELERA |
| 24 | RAAYFNWWATEMMLELIKSDDEREIREIEEEARRIL | AYFNWWATEMMLELIKSDDEREIREIEEEARRILEH |
| | EHLEELARKGGASPAAPAPASPAAPAPSAPAGGELE | LEELARK |
| | EQVMHVLDQVSELAHELLHKLTGEELERAAYFNWWA | (SEQ ID NO: 101)-X2- |
| | TEMMLELIKSDDEREIREIEEEARRILEHLEELARK | ELEEQVMH |
| | GGASPAAPAPASPAAPAPSAPAGGELEEQVMHVLDQ | VLDQVSELAHELLHKLTGEELERAAYFNWWATEMML |
| | VSELAHELLHKLTGEELERAAYFNWWATEMMLELIK | ELIKSDDEREIREIEEEARRILEHLEELARK |
| | SDDEREIREIEEE1ARRILEHLEELARK | (SEQ ID NO: 101)-X3- |
| | (SEQ ID NO: 274) | ELEEQVMHVLDQVSELAHEL |
| | | LHKLTGEELERAAYFNWWATEMMLELIKSDDEREIR |
| | | EIEEEARRILEHLEELARK |
| | | (SEQ ID NO: 101) |
| 3-3-3_ | MEKKISAWSHPQFEKGGGSGGGSGGSAWSHPQFEKG | X1- |
| PAS | GSGSSGNLDELHMQMTDLVYEALHFAKDEEFQKHVF | NLDELHMQMTDLVYEALHFAKDEEFQKHVFQL |
| 24 | QLFEKATKAYKNKDRQKLEKVVEELKELLERLLSGG | FEKATKAYKNKDRQKLEKVVEELKELLERLLS |
| | ASPAAPAPASPAAPAPSAPAGGNLDELHMQMTDLVY | (SEQ ID NO: 155)-X2- |
| | EALHFAKDEEFQKHVFQLFEKATKAYKNKDRQKLEK | NLDELHMQMTDLVYEALHF |
| | WEELKELLERLLSGGASPAAPAPASPAAPAPSAPAG | AKDEEFQKHVFQLFEKATKAYKNKDRQKLEKVVEEL |
| | GNLDELHMQMTDLVYEALHFAKDEEFQKHVFQLFEK | KELLERLLS |
| | ATKAYKNKDRQKLEKVVEELKELLERLLS | (SEQ ID NO: 155)-X3- |
| | (SEQ ID NO: 275) | NLDELH |
| | | MQMTDLVYEALHFAKDEEFQKHVFQLFEKATKAYKN |
| | | KDRQKLEKVVEELKELLERLLS |
| | | (SEQ ID NO: 155) |
| 2-2-1_ | MEKKISAWSHPQFEKGGGSGGGSGGSAWSHPQFEKG | X1- |
| PAS | GSGSSGELEEQVMHVLDQVSELAHELLHKLTGEELE | ELEEQVMHVLDQVSELAHELLHKLTGEELERA |
| 24 | RAAYFNWWATEMMLELIKSDDEREIREIEEEARRIL | AYFNWWATEMMLELIKSDDEREIREIEEEARR |
| | EHLEELARKGGASPAAPAPASPAAPAPSAPAGGELE | ILEHLEELARK |
| | EQVMHVLDQVSELAHELLHKLTGEELERAAYFNWWA | (SEQ ID NO: 101)-X2- |
| | TEMMLELIKSDDEREIREIEEEARRILEHLEELARK | ELEEQVMHVLDQVSELAHELLHKLTGEELERAAYFN |
| | GGASPAAPAPASPAAPAPSAPAGGDKENVLQKIYEl | WWATEMMLELIKSDDE-REIREIEEEARRILEHLEE |
| | MKELERLGHAEASMQVSDLIYEFMKTKDENLLEEAE | LARK |
| | RLLEEVKR | (SEQ ID NO: 101) |
| | (SEQ ID NO: 276) | X3-DKENVLQKIYEIMKELERLG |
| | | HAEASMQVSDLIYEFMKTKDENLLEEAERLLEEVKR |
| | | (SEQ ID NO: 135) |
| 2- | MEKKISAWSHPQFEKGGGSGGGSGGSAWSHPQFEKG | X1- |
| 2_ | GSGSSGELEEQVMHVLDQVSELAHELLHKLTGEELE | ELEEQVMHVLDQVSELAHELLHKLTGEELERA |
| PAS | RAAYFNWWATEMMLELIKSDDEREIREIEEEARRIL | AYFNWWATEMMLELIKSDDEREIREIEEEARRILEH |
| 16 | EHLEELARKGGASPAAPAPASPAGGELEEQVMHVLD | LEELARK |
| | QVSELAHELLHKLTGEELERAAYFNWWATEMMLELI | (SEQ ID NO: 101)-X2- |
| | KSDDEREIREIEEEARRILEHLEELARK | ELEEQVMH |
| | (SEQ ID NO: 277 | VLDQVSELAHELLHKLTGEELERAAYFNWWATEMML |
| | | ELIKSDDEREIREIEEEARRILEHLEELARK |
| | | (SEQ ID NO: 101) |
| 2-2_PAS | MEKKISAWSHPQFEKGGGSGGGSGGSAWSHPQFEKG | X1-ELEEQVMHVLDQVSELAHELLHKLTGEELERAA |
| 11 | GSGSSGELEEQVMHVLDQVSELAHELLHKLTGEELE | YFNWWATEMMLELIKSDDEREIREIEEEARRILEHL |
| | RAAYFNWWATEMMLELIKSDDEREIREIEEEARRIL | EELARK |
| | EHLEELARKGGASPAAPAGGELEEQVMHVLDQVSEL | (SEQ ID NO: 101) |
| | AHELLHKLTGEELERAAYFNWWATEMMLELIKSDDE | -X2-ELEEQVMH |
| | REIREIEEEARRILEHLEELARK | VLDQVSELAHELLHKLTGEELERAAYFNWWATEMML |
| | (SEQ ID NO: | ELIKSDDEREIREIEEEARRILEHLEELARK |
| | 278) | (SEQ ID NO: 101) |
| 3-1_PAS | MEKKISAWSHPQFEKGGGSGGGSGGSAWSHPQFEKG | X1-NLDELHMQMTDLVYEALHFAKDEEFQKHVFQLF |
| 16 | GSGSSGNLDELHMQMTDLVYEALHFAKDEEFQKHVF | EKATKAYKNKDRQKLEKVVEELKELLERLLS |
| | QLFEKATKAYKNKDRQKLEKVVEELKELLERLLSGGA | (SEQ ID NO: 155) |
| | SPAAPAPASPAGGDKENVLQKIYEIMKELERLGHAE | -X2-DKENVLQKIYEIMKELERLG |
| | ASMQVSDLIYEFMKTKDERLLEEAERLLEEVKR | HAEASMQVSDLIYEFMKTKDERLLEEAERLLEEVKR |
| | (SEQ ID NO: 279) | (SEQ ID NO: 125) |
| 3-1_PAS | MEKKISAWSHPQFEKGGGSGGGSGGSAWSHPQFEKG | X1-NLDELHMQMTDLVYEALHFAKDEEFQKHVFQLF |
| 11 | GSGSSGNLDELHMQMTDLVYEALHFAKDEEFQKHVF | EKATKAYKNKDRQKLEKVVEELKELLERLLS |
| | QLFEKATKAYKNKDRQKLEKVVEELKELLERLLSGGA | (SEQ ID NO: 155) |
| | SPAAPAGGDKENVLQKIYEIMKELERLGHAEASMQV | -X2- |
| | SDLIYEFMKTKDERLLEEAERLLEEVKR | DKENVLQKIYEIMKELERLG |
| | (SEQ ID NO: 280) | HAEASMQVSDLIYEFMKTKDERLLEEAERLLEEVKR |
| | | (SEQ ID NO: 125) |
| 2-1_PAS | MEKKISAWSHPQFEKGGGSGGGSGGSAWSHPQFEKG | X1-ELEEQVMHVLDQVSELAHELLHKLTGEELERAA |
| 16 | GSGSSGELEEQVMHVLDQVSELAHELLHKLTGEELE | YFNWWATEMMLELIKSDDEREIREIEEEARRILEHL |
| | RAAYFNWWATEMMLELIKSDDEREIREIEEEARRIL | EELARK |
| | EHLEELARKGGASPAAPAPASPAGGDKENVLQKIYE | (SEQ ID NO: 101) |
| | IMKELERLGHAEASMQVSDLIYEFMKTKDERLLEEA | -X2-DKENVLQK |
| | ERLLEEVKR | IYEIMKELERLGHAEASMQVSDLIYEFMKTKDERLL |
| | (SEQ ID NO: 281) | EEAERLLEEVKR |
| | | (SEQ ID NO: 125) |
| 2-1_PAS | MEKKISAWSHPQFEKGGGSGGGSGGSAWSHPQFEKG | X1-ELEEQVMHVLDQVSELAHELLHKLTGEELERAA |
| 11 | GSGSSGELEEQVMHVLDQVSELAHELLHKLTGEELE | YFNWWATEMMLELIKSDDEREIREIEEEARRILEHL |
| | RAAYFNWWATEMMLELIKSDDEREIREIEEEARRIL | EELARK(SEQ ID NO: 101) |
| | EHLEELARKGGASPAAPAGGDKENVLQKIYEIMKEL | -X2-DKENVLQKIYEI |
| | ERLGHAEASMQVSDLIYEFMKTKDERLLEEAERLLE | MKELERLGHAEASMQVSDLIYEFMKTKDERLLEEAE |
| | EVKR | RLLEEVKR |
| | (SEQ ID NO: 282) | (SEQ ID NO: 125) |
| 3v2.3- | MEKKISAWSHPQFEKGGGSGGGSGGSAWSHPQFEKG | X1-NIDELLMQVTDLIYEALHFAKDEEFQKHAFQLF |
| 2-1_PAS | GSGSSGNIDELLMQVTDLIYEALHFAKDEEFQKHAF | EKATKAYKNKDKQKLEKVVEELKELLERILS |
| 24 | QLFEKATKAYKNKDKQKLEKVVEELKELLERILSGGA | (SEQ ID NO: 163) |
| | SPAAPAPASPAAPAPSAPAGGELEEQVMHVLDQVSE | -X2- |
| | LAHELLHKLTGEELERAAYFNWWATEMMLELIKSDD | ELEEQVMHVLDQVSELAHEL |
| | EREIREIEEEARRILEHLEELARKGGASPAAPAPAS | LHKLTGEELERAAYFNWWATEMMLELIKSDDEREIR |
| | PAAPAPSAPAGGDKENVLQKIYEIMKELERLGHAEA | EIEEEARRILEHLEELARK |
| | SMQVSDLIYEFMKTKDERLLEEAERLLEEVKR | (SEQ ID NO: 101) |
| | (SEQ ID NO: 283) | -X3 |
| 2-3v2.3- | MEKKISAWSHPQFEKGGGSGGGSGGSAWSHPQFEKG | X1-ELEEQVMHVLDQVSELAHELLHKLTGEELERAA |
| 1_PAS | GSGSSGELEEQVMHVLDQVSELAHELLHKLTGEELE | YFNWWATEMMLELIKSDDEREIREIEEEARRILEHL |
| 24 | RAAYFNWWATEMMLELIKSDDEREIREIEEEARRIL | EELARK |
| | EHLEELARKGGASPAAPAPASPAAPAPSAPAGGNID | (SEQ ID NO: 101) |
| | ELLMQVTDLIYEALHFAKDEEFQKHAFQLFEKATKA | -X2-NIDELLMQ |
| | YKNKDKQKLEKVVEELKELLERILSGGASPAAPAPAS | VTDLIYEALHFAKDEEFQKHAFQLFEKATKAYKNKD |
| | PAAPAPSAPAGGDKENVLQKIYEIMKELERLGHAEA | KQKLEKVVEELKELLERILS |
| | SMQVSDLIYEFMKTKDERLLEEAERLLEEVKR | (SEQ ID NO: 163) |
| | (SEQ ID NO: 284) | -X3 |
| 2-2-2_PAS | MEKKISAWSHPQFEKGGGSGGGSGGSAWSHPQFEKG | X1-ELEEQVMHVLDQVSELAHELLHKLTGEELERAA |
| 24_ompT | GSGSSGELEEQVMHVLDQVSELAHELLHKLTGEELE | YFNWWATEMMLELIKSDDEREIREIEEEAARILEHL |
| | RAAYFNWWATEMMLELIKSDDEREIREIEEEAARIL | EELART |
| | EHLEELARTGGASPAAPAPASPAAPAPSAPAGGELE | (SEQ ID NO: 164) |
| | EQVMHVLDQVSELAHELLHKLTGEELERAAYFNWWA | -X2- |
| | TEMMLELIKSDDEREIREIEEEAARILEHLEELART | ELEEQVMH |
| | GGASPAAPAPASPAAPAPSAPAGGELEEQVMHVLDQ | VLDQVSELAHELLHKLTGEELERAAYFNWWATEMML |
| | VSELAHELLHKLTGEELERAAYFNWWATEMMLELIK | ELIKSDDEREIREIEEEAARILEHLEELART |
| | SDDEREIREIEEEAARILEHLEELART | (SEQ ID NO: 164) |
| | (SEQ ID NO: 285) | -X3-ELEEQVMHVLDQVSELAHE |
| | | LLHKLTGEELERAAYFNWWATEMMLELIKSDDEREI |
| | | REIEEEAARILEHLEELART |
| | | (SEQ ID NO: 164) |
| 1-1-1_ | MEKKISAWSHPQFEKGGGSGGGSGGSAWSHPQFEKG | X1- |
| _PAS | GSGSSGDKENVLQKIYEIMKELERLGHAEASMQV5D | DKENVLQKIYEIMKELERLGHAEASMQVSDLIYEFM |
| 24_ | LIYEFMKTKDENLLEEAERLLEEVTRGGASPAAPAP | KTKDERLLEEAERLLEEVKR |
| ompT | ASPAAPAPSAPAGGDKENVLQKIYEIMKELERLGHA | (SEQ ID NO: 125) |
| | EASMQVSDLIYEFMKTKDENLLEEAERLLEEVTRGG | -X2- |
| | ASPAAPAPASPAAPAPSAPAGGDKENVLQKIYEIMK | DKENVLQKIYEIMKELERLGHAEASMQVSDLIYEFM |
| | ELERLGHAEASMQVSDLIYEFMKTKDENLLEEAERL | KTKDERLLEEAERLLEEVKR |
| | LEEVTR | (SEQ ID NO: 125) |
| | (SEQ ID NO: 286) | -X3- |
| | | DKENVLQKIYEIMKELERLGHAEASMQVSDLIYEFM |
| | | KTKDERLLEEAERLLEEVKR |
| | | (SEQ ID NO: 125) |
| 3v2.3-2- | MEKKISAWSHPQFEKGGGSGGGSGGSAWSHPQFEKG | X1- |
| 1_PAS | GSGSSGNIDELLMQVTDLIYEALHFAKDEEFQKHAF | NIDELLMQVTDLIYEALHFAKDEEFQKHAFQLFEKA |
| 24_ | QLFEKATKAYKNKDKQKLEKVVEELKELLERILSGGA | TKAYKNKDKQKLEKVVEELKELLERILS |
| ompT | SPAAPAPASPAAPAPSAPAGGELEEQVMHVLDQVSE | (SEQ ID NO: 163) |
| | LAHELLHKLTGEELERAAYFNWWATEMMLELIKSDD | -X2- |
| | EREIREIEEEAARILEHLEELARTGGASPAAPAPAS | ELEEQVMHVLDQVSELAHELLHKLTGEELERAAYFN |
| | PAAPAPSAPAGGDKENVLQKIYEIMKELERLGHAEA | WWATEMMLELIKSDDEREIREIEEEAARILEHLEEL |
| | SMQVSDLIYEFMKTKDERLLEEAERLLEEVKR | ART |
| | (SEQ ID NO: 287) | (SEQ ID NO: 164) |
| | | -X3 |
| 2-3v2.3- | MEKKISAWSHPQFEKGGGSGGGSGGSAWSHPQFEKG | X1- |
| _PAS | GSGSSGELEEQVMHVLDQVSELAHELLHKLTGEELE | ELEEQVMHVLDQVSELAHELLHKLTGEELERAAYFN |
| 24_ | RAAYFNWWATEMMLELIKSDDEREIREIEEEAARIL | WWATEMMLELIKSDDEREIREIEEEAARILEHLEEL |
| ompT | EHLEELARTGGASPAAPAPASPAAPAPSAPAGGNID | ART |
| | ELLMQVTDLIYEALHFAKDEEFQKHAFQLFEKATKA | (SEQ ID NO: 164) |
| | YKNKDKQKLEKVVEELKELLERILSGGASPAAPAPAS | -X2- |
| | PAAPAPSAPAGGDKENVLQKIYEIMKELERLGHAEA | NIDELLMQVTDLIYEALHFAKDEEFQKHAFQLFEKA |
| | SMQVSDLIYEFMKTKDERLLEEAERLLEEVKR | TKAYKNKDKQKLEKVVEELKELLERILS |
| | (SEQ ID NO: 288) | (SEQ ID NO: 163) |
| | | -X3 |
| 3v2.3- | MEKKISAWSHPQFEKGGGSGGGSGGSAWSHPQFEKG | X1- |
| 1_2-1_ | GSGSSGNIDELLMQVTDLIYEALHFAKDEEFQKHAF | NIDELLMQVTDLIYEALHFAKDEEFQKHAFQLFEKA |
| _PAS | QLFEKATKAYKNKDKQKLEKVVEELKELLERILSGG | TKAYKNKDKQKLEKVVEELKELLERILS |
| 24 | ASPAAPAPASPAAPAPSAPAGGELEEQVMHVLDQVS | (SEQ ID NO: 163) |
| | ELAHELLHKLTGEELERAAYFNWWATEMMLELIKSD | -X2- |
| | DEREIREIEEEARRILEHLEELARKGGASPAAPAPA | ELEEQVMHVLDQVSELAHELLHKLTGEELERAAYFN |
| | SPAAPAPSAPAGGDKENVLQKIYEIMKELERLGHAE | WWATEMMLELIKSDDEREIREIEEEARRILEHLEEL |
| | ASMQVSDLIYEFMKTKDENLLEEAERLLEEVKR | ARK |
| | (SEQ ID NO: 289) | (SEQ ID NO: 101) |
| | | -X3- |
| | | DKENVLQKIYEIMKELERLGHAEASMQVSDLIYEFM |
| | | KTKDENLLEEAERLLEEVKR |
| | | (SEQ ID NO: 135) |
| 2-3v2.3- | MEKKISAWSHPQFEKGGGSGGGSGGSAWSHPQFEK | X1- |
| 1_ | GGSGSSGELEEQVMHVLDQVSELAHELLHKLTGEEL | ELEEQVMHVLDQVSELAHELLHKLTGEELERAAYFN |
| _PAS | ERAAYFNWV/ATEMMLELIKSDDEREIREIEEEARR | WWATEMMLELIKSDDEREIREIEEEARRILEHLEEL |
| 24 | ILEHLEELARKGGASPAAPAPASPAAPAPSAPAGGN | ARK |
| | IDELLMQVTDLIYEALHFAKDEEFQKHAFQLFEKAT | (SEQ ID NO: 101) |
| | KAYKNKDKQKLEKVVEELKELLERILSGGASPAAPAP | -X2- |
| | ASPAAPAPSAPAGGDKENVLQKIYEIMKELERLGHA | NIDELLMQVTDLIYEIALHFAKDEEFQKHAFQLFEK |
| | EASMQVSDLIYEFMKTKDENLLEEAERLLEEVKR | ATKAYKNKDKQKLEKVVEELKELLERILS |
| | (SEQ ID NO: 290) | (SEQ ID NO: 163) |
| | | -X3- |
| | | DKENVLQKIYEIMKELERLGHAEASMQVSDLIYEFM |
| | | KTKDENLLEEAERLLEEVKR |
| | | (SEQ ID NO: 135) |
| 3v2.3- | MEKKISAWSHPQFEKGGGSGGGSGGSAWSHPQFEKG | X1- |
| 2-1_ | GSGSSGNIDELLMQVTDLIYEALHFAKDEEFQKHAF | NIDELLMQVTDLIYEIALHFAKDEEFQKHAFQLFEK |
| _PAS | QLFEKATKAYKNKDKQKLEKVVEELKELLERILSGGA | ATKAYKNKDKQKLEKVVEELKELLERILS |
| 24_ | SPAAPAPASPAAPAPSAPAGGELEEQVMHVLDQVSE | (SEQ ID NO: 163) |
| ompT | LAHELLHKLTGEELERAAYFNWWATEMMLELIKSDD | -X2- |
| | EREIREIEEEAARILEHLEELARTGGASPAAPAPAS | ELEEQVMHVLDQVSELAHELLHKLTGEELERAAYFN |
| | PAAPAPSAPAGGDKENVLQKIYEIMKELERLGHAEA | WWATEMMLELIKSDDEREIREIEEEAARILEHLEEL |
| | SMQVSDLIYEFMKTKDENLLEEAERLLEEVKR | ART |
| | (SEQ ID NO: 291) | (SEQ ID NO: 164) |
| | | -X3- |
| | | DKENVLQKIYEIMKELERLGHAEASMQVSDLIYEFM |
| | | KTKDENLLEEAERLLEEVKR |
| | | (SEQ ID NO: 135) |
| 2-3v2.3- | MEKKISAWSHPQFEKGGGSGGGSGGSAWSHPQFEKG | X1- |
| 1_ | GSGSSGELEEQVMHVLDQVSELAHELLHKLTGEELE | ELEEQVMHVLDQVSELAHELLHKLTGEELERAAYFN |
| _PAS | RAAYFNWWATEMMLELIKSDDEREIREIEEEAARIL | WWATEMMLELIKSDDEREIREIEEEAARILEHLEEL |
| 24_ | EHLEELARTGGASPAAPAPASPAAPAPSAPAGGNID | ART |
| ompT | ELLMQVTDLIYEALHFAKDEEFQKHAFQLFEKATKA | (SEQ ID NO: 164) |
| | YKNKDKQKLEKVVEELKELLERILSGGASPAAPAPA | -X2- |
| | SPAAPAPSAPAGGDKENVLQKIYEIMKELERLGHAE | NIDELLMQVTDLIYEALHFAKDEEFQKHAFQLFEKA |
| | ASMQVSDLIYEFMKTKDENLLEEAERLLEEVKR | TKAYKNKDKQKLEKVVEELKELLERILS |
| | (SEQ ID NO: 292) | (SEQ ID NO: 163) |
| | | -X3- |
| | | DKENVLQKIYEIMKELERLGHAEASMQVSDLIYEFM |
| | | KTKDENLLEEAERLLEEVKR |
| | | (SEQ ID NO: 135) |
| 2-3v2.3- | MEKKIHHHHHHSGENLYFQSGGSGSSGELEEQVMHV | X1- |
| 1_PAS | LDQVSELAHELLHKLTGEELERAAYFNWWATEMMLE | ELEEQVMHVLDQVSELAHELLHKLTGEELERAAYFN |
| 24__N- | LIKSDDEREIREIEEEARRILEHLEELARKGGASPA | WWATEMMLELIKSDDEREIREIEEEARRILEHLEEL |
| His-TEV | APAPASPAAPAPSAPAGGNIDELLMQVTDLIYEALH | ARK |
| | FAKDEEFQKHAFQLFEKATKAYKNKDKQKLEKVVEE | (SEQ ID NO: 101) |
| | LKELLERILSGGASPAAPAPASPAAPAPSAPAGGDK | -X2- |
| | ENVLQKIYEIMKELERLGHAEASMQVSDLIYEFMKT | NIDELLMQVTDLIYEALHFAKDEEFQKHAFQLFEKA |
| | KDENLLEEAERLLEEVKR | TKAYKNKDKQKLEKVVEELKELLERILS |
| | (SEQ ID NO: 293) | (SEQ ID NO: 163) |
| | | -X3- |
| | | DKENVLQKIYEIMKELERLGHAEASMQVSDLIYEFM |
| | | KTKDENLLEEAERLLEEVKR |
| | | (SEQ ID NO: 135) |
| 2-3v2.3-1_ | MEKKIHHHHHHSGENLYFQSGGSGSSGELEEQVMHV | X1- |
| PAS | LDQVSELAHELLHKLTGEELERAAYFNWWATEMMLE | ELEEQVMHVLDQVSELAHELLHKLTGEELERAAYFN |
| 24_ompTN- | LIKSDDEREIREIEEEAARILEHLEELARTGGASPA | WWATEMMLELIKSDDEREIREIEEEAARILEHLEEL |
| His-TEV | APAPASPAAPAPSAPAGGNIDELLMQVTDLIYEALH | ART |
| | FAKDEEFQKHAFQLFEKATKAYKNKDKQKLEKVVEE | (SEQ ID NO: 164) |
| | LKELLERILSGGASPAAPAPASPAAPAPSAPAGGDK | -X2- |
| | ENVLQKIYEIMKELERLGHAEASMQVSDLIYEFMKT | NIDELLMQVTDLIYEALHFAKDEEFQKHAFQLFEKA |
| | KDENLLEEAERLLEEVKR | TKAYKNKDKQKLEKVVEELKELLERILS |
| | (SEQ ID NO: 294) | (SEQ ID NO: 163) |
| | | -X3- |
| | | DKENVLQKIYEIMKELERLGHAEASMQVSDLIYEFM |
| | | KTKDENLLEEAERLLEEVKR |
| | | (SEQ ID NO: 135) |
| 2-3-1_PAS | MEKKIDYKDDDDKGSGSSAWSHPQFEKGGGSGGGSG | X1- |
| 24_NTSF | GSAWSHPQFEKGGSGSSGELEEQVMHVLDQVSELAH | ELEEQVMHVLDQVSELAHELLHKLTGEELERAAYFN |
| | ELLHKLTGEELERAAYFNWWATEMMLELIKSDDERE | WWATEMMLELIKSDDEREIREIEEEARRILEHLEEL |
| | IREIEEEARRILEHLEELARKGGASPAAPAPASPAA | ARK |
| | PAPSAPAGGNIDELLMQVTDLIYEALHFAKDEEFQK | (SEQ ID NO: 101) |
| | HAFQLFEKATKAYKNKDKQKLEKVVEELKELLERIL | -X2- |
| | SGGASPAAPAPASPAAPAPSAPAGGDKENVLQKIYE | NIDELLMQVTDLIYEALHFAKDEEFQKHAFQLFEKA |
| | IMKELERLGHAEASMQVSDLIYEFMKTKDENLLEEA | TKAYKNKDKQKLEKVVEELKELLERILS |
| | ERLLEEVKR | (SEQ ID NO: 163) |
| | (SEQ ID NO: 295) | -X3- |
| | | DKENVLQKIYEIMKELERLGHAEASMQVSDLIYEFM |
| | | KTKDENLLEEAERLLEEVKR |
| | | (SEQ ID NO: 135) |
| 2-3-1_PAS | MEKKIDYKDHDGDYKDHDIDYKDDDDKGSGSSAWSH | X1- |
| 24_NTS3F | PQFEKGGGSGGGSGGSAWSHPQFEKGGSGSSGELEE | ELEEQVMHVLDQVSELAHELLHKLTGEELERAAYFN |
| | QVMHVLDQVSELAHELLHKLTGEELERAAYFNWWAT | WWATEMMLELIKSDDEREIREIEEEARRILEHLEEL |
| | EMMLELIKSDDEREIREIEEEARRILEHLEELARKG | ARK |
| | GASPAAPAPASPAAPAPSAPAGGNIDELLMQVTDLI | (SEQ ID NO: 101) |
| | YEALHFAKDEEFQKHAFQLFEKATKAYKNKDKQKLE | -X2- |
| | KVVEELKELLERILSGGASPAAPAPASPAAPAPSAP | NIDELLMQVTDLIYEALHFAKDEEFQKHAFQLFEKA |
| | AGGDKENVLQKIYEIMKELERLGHAEASMQVSDLIY | TKAYKNKDKQKLEKVVEELKELLERILS |
| | EFMKTKDENLLEEAERLLEEVKR | (SEQ ID NO: 163) |
| | (SEQ ID NO: 296) | -X3- |
| | | DKENVLQKIYEIMKELERLGHAEASMQVSDLIYEFM |
| | | KTKDENLLEEAERLLEEVKR |
| | | (SEQ ID NO: 135) |
| 2-3-1_PAS | MEKKIEQKLISEEDLGSGSSAWSHPQFEKGGGSGGG | X1- |
| 24_NTSM | SGGSAWSHPQFEKGGSGSSGELEEQVMHVLDQVSEL | ELEEQVMHVLDQVSELAHELLHKLTGEELERAAYFN |
| | AHELLHKLTGEELERAAYFNWWATEMMLELIKSDDE | WWATEMMLELIKSDDEREIREIEEEARRILEHLEEL |
| | REIREIEEEARRILEHLEELARKGGASPAAPAPASP | ARK |
| | AAPAPSAPAGGNIDELLMQVTDLIYEALHFAKDEEF | (SEQ ID NO: 101) |
| | QKHAFQLFEKATKAYKNKDKQKLEKVVEELKELLER | -X2- |
| | ILSGGASPAAPAPASPAAPAPSAPAGGDKENVLQKI | NIDELLMQVTDLIYEALHFAKDEEFQKHAFQLFEKA |
| | YEIMKELERLGHAEASMQVSDLIYEFMKTKDENLLE | TKAYKNKDKQKLEKVVEELKELLERILS |
| | EAERLLEEVKR | (SEQ ID NO: 163) |
| | (SEQ ID NO: 297) | -X3- |
| | | DKENVLQKIYEIMKELERLGHAEASMQVSDLIYEFM |
| | | KTKDENLLEEAERLLEEVKR |
| | | (SEQ ID NO: 135) |
| 2-PAS | MEKKIDYKDHDGDYKDHDIDYKDDDDKGSGSSAWSH | X1- |
| 24-3- | PQFEKGGGSGGGSGGSAWSHPQFEKGGSGSSGELEE | ELEEQVMHVLDQVSELAHELLHKLTGEELERAAYFN |
| PAS | QVMHVLDQVSELAHELLHKLTGEELERAAYFNWWAT | WWATEMMLELIKSDDEREIREIEEEARRILEHLEEL |
| 16-1_ | EMMLELIKSDDEREIREIEEEARRILEHLEELARKG | ARK |
| NTS3F | GASPAAPAPASPAAPAPSAPAGGNIDELLMQVTDLI | (SEQ ID NO: 101) |
| | YEALHFAKDEEFQKHAFQLFEKATKAYKNKDKQKLE | -X2- |
| | KVVEELKELLERILSGGASPAAPAPASPAGGDKENV | NIDELLMQVTDLIYEALHFAKDEEFQKHAFQLFEKA |
| | LQKIYEIMKELERLGHAEASMQVSDLIYEFMKTKDE | TKAYKNKDKQKLEKVVEELKELLERILS |
| | NLLEEAERLLEEVKR | (SEQ ID NO: 163) |
| | (SEQ ID NO: 298) | -X3- |
| | | DKENVLQKIYEIMKELERLGHAEASMQVSDLIYEFM |
| | | KTKDENLLEEAERLLEEVKR |
| | | (SEQ ID NO: 135) |
| 2- | MEKKIDYKDHDGDYKDHDIDYKDDDDKGSGSSAWSH | X1- |
| PAS16-3- | PQFEKGGGSGGGSGGSAWSHPQFEKGGSGSSGELEE | ELEEQVMHVLDQVSELAHELLHKLTGEELERAAYFN |
| PAS16- | QVMHVLDQVSELAHELLHKLTGEELERAAYFNWWAT | WWATEMMLELIKSDDEREIREIEEEARRILEHLEEL |
| 1_NTS | EMMLELIKSDDEREIREIEEEARRILEHLEELARKG | ARK |
| 3F | GASPAAPAPASPAGGNIDELLMQVTDLIYEALHFAK | (SEQ ID NO: 101) |
| | DEEFQKHAFQLFEKATKAYKNKDKQKLEKVVEELKE | -X2- |
| | LLERILSGGASPAAPAPASPAGGDKENVLQKIYEIM | NIDELLMQVTDLIYEALHFAKDEEFQKHAFQLFEKA |
| | KELERLGHAEASMQVSDLIYEFMKTKDENLLEEAER | TKAYKNKDKQKLEKVVEELKELLERILS |
| | LLEEVKR | (SEQ ID NO: 163) |
| | (SEQ ID NO: 299) | -X3- |
| | | DKENVLQKIYEIMKELERLGHAEASMQVSDLIYEFM |
| | | KTKDENLLEEAERLLEEVKR |
| | | (SEQ ID NO: 135) |
| 2- | MEKKIDYKDHDGDYKDHDIDYKDDDDKGSGSSAWSH | X1- |
| PAS11- | PQFEKGGGSGGGSGGSAWSHPQFEKGGSGSSGELEE | ELEEQVMHVLDQVSELAHELLHKLTGEELERAAYFN |
| 3- | QVMHVLDQVSELAHELLHKLTGEELERAAYFNWWAT | WWATEMMLELIKSDDEREIREIEEEARRILEHLEEL |
| PAS16-1_NTS | EMMLELIKSDDEREIREIEEEARRILEHLEELARKG | ARK |
| 3F | GASPAAPAGGNIDELLMQVTDLIYEALHFAKDEEFQ | (SEQ ID NO: 101) |
| | KHAFQLFEKATKAYKNKDKQKLEKVVEELKELLERI | -X2- |
| | LSGGASPAAPAPASPAGGDKENVLQKIYEIMKELER | NIDELLMQVTDLIYEALHFAKDEEFQKHAFQLFEKA |
| | LGHAEASMQVSDLIYEFMKTKDENLLEEAERLLEEV | TKAYKNKDKQKLEKVVEELKELLERILS |
| | KR | (SEQ ID NO: 163) |
| | (SEQ ID NO: 300) | -X3- |
| | | DKENVLQKIYEIMKELERLGHAEASMQVSDLIYEFM |
| | | KTKDENLLEEAERLLEEVKR |
| | | (SEQ ID NO: 135) |
| 2- | MEKKIDYKDHDGDYKDHDIDYKDDDDKGSGSSAWSH | X1- |
| PAS24 | PQFEKGGGSGGGSGGSAWSHPQFEKGGSGSSGELEE | ELEEQVMHVLDQVSELAHELLHKLTGEELERAAYFN |
| -3- | QVMHVLDQVSELAHELLHKLTGEELERAAYFNWWAT | WWATEMMLELIKSDDEREIREIEEEARRILEHLEEL |
| PAS11-1_ | EMMLELIKSDDEREIREIEEEARRILEHLEELARKG | ARK |
| NTS | GASPAAPAPASPAAPAPSAPAGGNIDELLMQVTDLI | (SEQ ID NO: 101) |
| 3F | YEALHFAKDEEFQKHAFQLFEKATKAYKNKDKQKLE | -X2- |
| | KVVEELKELLERILSGGASPAAPAGGDKENVLQKIY | NIDELLMQVTDLIYEALHFAKDEEFQKHAFQLFEKA |
| | EIMKELERLGHAEASMQVSDLIYEFMKTKDENLLEE | TKAYKNKDKQKLEKVVEELKELLERILS |
| | AERLLEEVKR | (SEQ ID NO: 163) |
| | (SEQ ID NO: 301) | -X3- |
| | | DKENVLQKIYEIMKELERLGHAEASMQVSDLIYEFM |
| | | KTKDENLLEEAERLLEEVKR |
| | | (SEQ ID NO: 135) |
| 2- | MEKKIDYKDHDGDYKDHDIDYKDDDDKGSGSSAWSH | X1- |
| PAS16 | PQFEKGGGSGGGSGGSAWSHPQFEKGGSGSSGELEE | ELEEQVMHVLDQVSELAHELLHKLTGEELERAAYFN |
| -3- | QVMHVLDQVSELAHELLHKLTGEELERAAYFNWWAT | WWATEMMLELIKSDDEREIREIEEEARRILEHLEEL |
| PAS11- | EMMLELIKSDDEREIREIEEEARRILEHLEELARKG | ARK |
| 1_NTS | GASPAAPAPASPAGGNIDELLMQVTDLIYEALHFAK | (SEQ ID NO: 101) |
| 3F | DEEFQKHAFQLFEKATKAYKNKDKQKLEKVVEELKE | -X2- |
| | LLERILSGGASPAAPAGGDKENVLQKIYEIMKELER | NIDELLMQVTDLIYEALHFAKDEEFQKHAFQLFEKA |
| | LGHAEASMQVSDLIYEFMKTKDENLLEEAERLLEEV | TKAYKNKDKQKLEKVVEELKELLERILS |
| | KR | (SEQ ID NO: 163) |
| | (SEQ ID NO: 302) | -X3- |
| | | DKENVLQKIYEIMKELERLGHAEASMQVSDLIYEFM |
| | | KTKDENLLEEAERLLEEVKR |
| | | (SEQ ID NO: 135) |
| 2- | MEKKIDYKDHDGDYKDHDIDYKDDDDKGSGSSAWSH | X1- |
| PAS11 | PQFEKGGGSGGGSGGSAWSHPQFEKGGSGSSGELEE | ELEEQVMHVLDQVSELAHELLHKLTGEELERAAYFN |
| -3- | QVMHVLDQVSELAHELLHKLTGEELERAAYFNWWAT | WWATEMMLELIKSDDEREIREIEEEARRILEHLEEL |
| PAS11- | EMMLELIKSDDEREIREIEEEARRILEHLEELARKG | ARK |
| 1_NTS | GASPAAPAGGNIDELLMQVTDLIYEALHFAKDEEFQ | (SEQ ID NO: 101) |
| 3F | KHAFQLFEKATKAYKNKDKQKLEKVVEELKELLERI | -X2- |
| | LSGGASPAAPAGGDKENVLQKIYEIMKELERLGHAE | NIDELLMQVTDLIYEALHFAKDEEFQKHAFQLFEKA |
| | ASMQVSDLIYEFMKTKDENLLEEAERLLEEVKR | TKAYKNKDKQKLEKVVEELKELLERILS |
| | (SEQ ID NO: 303) | (SEQ ID NO: 163) |
| | | -X3- |
| | | DKENVLQKIYEIMKELERLGHAEASMQVSDLIYEFM |
| | | KTKDENLLEEAERLLEEVKR |
| | | (SEQ ID NO: 135) |
| 2- | MEKKISAWSHPQFEKGGGSGGGSGGSAWSHPQFEKG | X1- |
| 2_G4 | GSGSSGELEEQVMHVLDQVSELAHELLHKLTGEELE | ELEEQVMHVLDQVSELAHELLHKLTGEELERAAYFN |
| | RAAYFNWWATEMMLELIKSDDEREIREIEEEARRIL | WWATEMMLELIKSDDEREIREIEEEARRILEHLEEL |
| | EHLEELARKGGGGELEEQVMHVLDQVSELAHELLHK | ARK |
| | LTGEELERAAYFNWWATEMMLELIKSDDEREIREIE | (SEQ ID NO: 101) |
| | EEARRILEHLEELARK | -X2- |
| | (SEQ ID NO: 304) | ELEEQVMHVLDQVSELAHELLHKLTGEELERAAYFN |
| | | WWATEMMLELIKSDDEREIREIEEEARRILEHLEEL |
| | | ARK |
| | | (SEQ ID NO: 101) |
| 2- | MEKKISAWSHPQFEKGGGSGGGSGGSAWSHPQFEKG | X1- |
| 2_G2 | GSGSSGELEEQVMHVLDQVSELAHELLHKLTGEELE | ELEEQVMHVLDQVSELAHELLHKLTGEELERAAYFN |
| | RAAYFNWWATEMMLELIKSDDEREIREIEEEARRIL | WWATEMMLELIKSDDEREIREIEEEARRILEHLEEL |
| | EHLEELARKGGELEEQVMHVLDQVSELAHELLHKLT | ARK |
| | GEELERAAYFNWWATEMMLELIKSDDEREIREIEEE | (SEQ ID NO: 101) |
| | ARRILEHLEELARK | -X2- |
| | (SEQ ID NO: 305) | ELEEQVMHVLDQVSELAHELLHKLTGEELERAAYFN |
| | | WWATEMMLELIKSDDEREIREIEEEARRILEHLEEL |
| | | ARK |
| | | (SEQ ID NO: 101) |
| 2- | MEKKISAWSHPQFEKGGGSGGGSGGSAWSHPQFEKG | X1- |
| 3_ | GSGSSGELEEQVMHVLDQVSELAHELLHKLTGEELE | ELEEQVMHVLDQVSELAHELLHKLTGEELERAAYFN |
| PAS | RAAYFNWWATEMMLELIKSDDEREIREIEEEARRIL | WWATEMMLELIKSDDEREIREIEEEARRILEHLEEL |
| 24 | EHLEELARKGGASPAAPAPASPAAPAPSAPAGGNID | ARK |
| | ELLMQVTDLIYEALHFAKDEEFQKHAFQLFEKATKA | (SEQ ID NO: 101) |
| | YKNKDKQKLEKVVEELKELLERILS | -X2- |
| | (SEQ ID NO: 306) | NIDELLMQVTDLIYEALHFAKDEEFQKHAFQLFEKA |
| | | TKAYKNKDKQKLEKVVEELKELLERILS |
| | | (SEQ ID NO: 163) |
| 2- | MEKKISAWSHPQFEKGGGSGGGSGGSAWSHPQFEKG | X1- |
| 3_ | GSGSSGELEEQVMHVLDQVSELAHELLHKLTGEELE | ELEEQVMHVLDQVSELAHELLHKLTGEELERAAYFN |
| PAS | RAAYFNWWATEMMLELIKSDDEREIREIEEEARRIL | WWATEMMLELIKSDDEREIREIEEEARRILEHLEEL |
| 16 | EHLEELARKGGASPAAPAPASPAGGNIDELLMQVTD | ARK |
| | LIYEALHFAKDEEFQKHAFQLFEKATKAYKNKDKQK | (SEQ ID NO: 101) |
| | LEKVVEELKELLERILS | -X2- |
| | (SEQ ID NO: 307) | NIDELLMQVTDLIYEALHFAKDEEFQKHAFQLFEKA |
| | | TKAYKNKDKQKLEKVVEELKELLERILS |
| | | (SEQ ID NO: 163) |
| 2- | MEKKISAWSHPQFEKGGGSGGGSGGSAWSHPQFEKG | X1- |
| 3_ | GSGSSGELEEQVMHVLDQVSELAHELLHKLTGEELE | ELEEQVMHVLDQVSELAHELLHKLTGEELERAAYFN |
| PAS | RAAYFNWWATEMMLELIKSDDEREIREIEEEARRIL | WWATEMMLELIKSDDEREIREIEEEARRILEHLEEL |
| 11 | EHLEELARKGGASPAAPAGGNIDELLMQVTDLIYEA | ARK |
| | LHFAKDEEFQKHAFQLFEKATKAYKNKDKQKLEKVV | (SEQ ID NO: 101) |
| | EELKELLERILS | -X2- |
| | (SEQ ID NO: 308) | NIDELLMQVTDLIYEALHFAKDEEFQKHAFQLFEKA |
| | | TKAYKNKDKQKLEKVVEELKELLERILS |
| | | (SEQ ID NO: 163) |
| 1-2-1 | MEKKISAWSHPQFEKGGGSGGGSGGSAWSHPQFEKG | X1- |
| _PAS | GSGSSGDKENVLQKIYEIMKELERLGHAEASMQVSD | DKENVLQKIYEIMKELERLGHAEASMQVSDLIYEFM |
| 24 | LIYEFMKTKDENLLEEAERLLEEVKRGGASPAAPAP | KTKDENLLEEAERLLEEVKR |
| | ASPAAPAPSAPAGGELEEQVMHVLDQVSELAHELLH | (SEQ ID NO: 135) |
| | KLTGEELERAAYFNWWATEMMLELIKSDDEREIREI | -X2- |
| | EEEARRILEHLEELARKGGASPAAPAPASPAAPAPS | ELEEQVMHVLDQVSELAHELLHKLTGEELERAAYFN |
| | APAGGDKENVLQKIYEIMKELERLGHAEASMQVSDL | WWATEMMLELIKSDDEREIREIEEEARRILEHLEEL |
| | IYEFMKTKDENLLEEAERLLEEVKR | ARK |
| | (SEQ ID NO: 309) | (SEQ ID NO: 101) |
| | | -X3- |
| | | DKENVLQKIYEIMKELERLGHAEASMQVSDLIYEFM |
| | | KTKDENLLEEAERLLEEVKR |
| | | (SEQ ID NO: 135) |
| 2- | MEKKISAWSHPQFEKGGGSGGGSGGSAWSHPQFEKG | X1-ELEEQVMHVLDQVSELAHELLHKLTGEELERAAYFN |
| PAS24 | GSGSSGELEEQVMHVLDQVSELAHELLHKLTGEELE | WWATEMMLELIKSDDEREIREIEEEARRILEHLEEL |
| -3- | RAAYFNWWATEMMLELIKSDDEREIREIEEEARRIL | ARK |
| PAS24- | EHLEELARKGGASPAAPAPASPAAPAPSAPAGGNLD | (SEQ ID NO: 101) |
| 1_NTS | ELHMQMTDLVYEALHFAKDEEFQKHVFQLFEKATKA | -X2- |
| | YKNKDRQKLEKVVEELKELLERLLSGGASPAAPAPA | NLDELHMQMTDLVYEALHFAKDEEFQKHVFQLFEKA |
| | SPAAPAPSAPAGGDKENVLQKIYEIMKELERLGHAE | TKAYKNKDRQKLEKVVEELKELLERLLS |
| | ASMQVSDLIYEFMKTKDENLLEEAERLLEEVKR | (SEQ ID NO: 155) |
| | (SEQ ID NO: 310) | -X3- |
| | | DKENVLQKIYEIMKELERLGHAEASMQVSDLIYEFM |
| | | KTKDENLLEEAERLLEEVKR |
| | | (SEQ ID NO: 135) |
| 2- | MEKKISAWSHPQFEKGGGSGGGSGGSAWSHPQFEKG | X1- |
| PAS24 | GSGSSGELEEQVMHVLDQVSELAHELLHKLTGEELE | ELEEQVMHVLDQVSELAHELLHKLTGEELERAAYFN |
| -3- | RAAYFNWWATEMMLELIKSDDEREIREIEEEARRIL | WWATEMMLELIKSDDEREIREIEEEARRILEHLEEL |
| PAS16 | EHLEELARKGGASPAAPAPASPAAPAPSAPAGGNLD | ARK |
| 1_NTS | ELHMQMTDLVYEALHFAKDEEFQKHVFQLFEKATKA | (SEQ ID NO: 101) |
| | YKNKDRQKLEKVVEELKELLERLLSGGASPAAPAPA | -X2- |
| | SPAGGDKENVLQKIYEIMKELERLGHAEASMQVSDL | NLDELHMQMTDLVYEALHFAKDEEFQKHVFQLFEKA |
| | IYEFMKTKDENLLEEAERLLEEVKR | TKAYKNKDRQKLEKVVEELKELLERLLS |
| | (SEQ ID NO: 311) | (SEQ ID NO: 155) |
| | | -X3- |
| | | DKENVLQKIYEIMKELERLGHAEASMQVSDLIYEFM |
| | | KTKDENLLEEAERLLEEVKR |
| | | (SEQ ID NO: 135) |
| 2- | MEKKISAWSHPQFEKGGGSGGGSGGSAWSHPQFEKG | X1- |
| PAS16 | GSGSSGELEEQVMHVLDQVSELAHELLHKLTGEELE | ELEEQVMHVLDQVSELAHELLHKLTGEELERAAYFN |
| -3- | RAAYFNWWATEMMLELIKSDDEREIREIEEEARRIL | WWATEMMLELIKSDDEREIREIEEEARRILEHLEELARK |
| PAS24 | EHLEELARKGGASPAAPAPASPAGG | (SEQ ID NO: 101) |
| 1_NTS | (SEQ ID NO: 155) | -X2- |
| | GGASPAAPAPASPAAPAPSAPAGGDKENVLQKIYEI | NLDELHMQMTDLVYEALHFAKDEEFQKHVFQLFEKA |
| | MKELERLGHAEASMQVSDLIYEFMKTKDENLLEEAE | TKAYKNKDRQKLEKVVEELKELLERLLS |
| | RLLEEVKR | (SEQ ID NO: 155) |
| | (SEQ ID NO: 312) | -X3- |
| | | DKENVLQKIYEIMKELERLGHAEASMQVSDLIYEFM |
| | | KTKDENLLEEAERLLEEVKR |
| | | (SEQ ID NO: 135) |
| 2- | MEKKISAWSHPQFEKGGGSGGGSGGSAWSHPQFEKG | X1- |
| PAS16 | GSGSSGELEEQVMHVLDQVSELAHELLHKLTGEELE | ELEEQVMHVLDQVSELAHELLHKLTGEELERAAYFN |
| -3- | RAAYFNWWATEMMLELIKSDDEREIREIEEEARRIL | WWATEMMLELIKSDDEREIREIEEEARRILEHLE |
| PAS16 | EHLEELARKGGASPAAPAPASPAGGNLDELHMQMTD | ELARK |
| 1_NTS | LVYEALHFAKDEEFQKHVFQLFEKATKAYKNKDRQK | (SEQ ID NO: 101) |
| | LEKVVEELKELLERLLSGGASPAAPAPASPAGGDKE | -X2- |
| | NVLQKIYEIMKELERLGHAEASMQVSDLIYEFMKTK | NLDELHMQMTDLVYEALHFAKDEEFQKHVFQLFEKA |
| | DENLLEEAERLLEEVKR | TKAYKNKDRQKLEKVVEELKELLERLLS |
| | (SEQ ID NO: 313} | (SEQ ID NO: 155) |
| | | -X3- |
| | | DKENVLQKIYEIMKELERLGHAEASMQVSDLIYEFM |
| | | KTKDENLLEEAERLLEEVKR |
| | | (SEQ ID NO: 135) |
| 2- | MEKKISAWSHPQFEKGGGSGGGSGGSAWSHPQFEKG | X1- |
| PAS11 | GSGSSGELEEQVMHVLDQVSELAHELLHKLTGEELE | ELEEQVMHVLDQVSELAHELLHKLTGEELERAAYFN |
| -3- | RAAYFNWWATEMMLELIKSDDEREIREIEEEARRIL | WWATEMMLELIKSDDEREIREIEEEARRILEHLEEL |
| PAS16 | EHLEELARKGGASPAAPAGGNLDELHMQMTDLVYEA | ARK |
| 1_NTS | LHFAKDEEFQKHVFQLFEKATKAYKNKDRQKLEKVV | (SEQ ID NO: 101) |
| | EELKELLERLLSGGASPAAPAPASPAGGDKENVLQK | -X2- |
| | IYEIMKELERLGHAEASMQVSDLIYEFMKTKDENLL | NLDELHMQMTDLVYEALHFAKDEEFQKHVFQLFEKA |
| | EEAERLLEEVKR | TKAYKNKDRQKLEKVVEELKELLERLLS |
| | (SEQ ID NO: 314) | (SEQ ID NO: 155) |
| | | -X3- |
| | | DKENVLQKIYEIMKELERLGHAEASMQVSDLIYEFM |
| | | KTKDENLLEEAERLLEEVKR |
| | | (SEQ ID NO: 135) |
| 2- | MEKKISAWSHPQFEKGGGSGGGSGGSAWSHPQFEKG | X1- |
| PAS24 | GSGSSGELEEQVMHVLDQVSELAHELLHKLTGEELE | ELEEQVMHVLDQVSELAHELLHKLTGEELERAAYFN |
| -3- | RAAYFNWWATEMMLELIKSDDEREIREIEEEARRIL | WWATEMMLELIKSDDEREIREIEEEARRILEHLEEL |
| PAS11 | EHLEELARKGGASPAAPAPASPAAPAPSAPAGGNLD | ARK |
| 1_NTS | ELHMQMTDLVYEALHFAKDEEFQKHVFQLFEKATKA | (SEQ ID NO: 101) |
| | YKNKDRQKLEKVVEELKELLERLLSGGASPAAPAGG | -X2- |
| | DKENVLQKIYEIMKELERLGHAEASMQVSDLIYEFM | NLDELHMQMTDLVYEALHFAKDEEFQKHVFQLFEKA |
| | KTKDENLLEEAERLLEEVKR | TKAYKNKDRQKLEKVVEELKELLERLLS |
| | (SEQ ID NO: 315) | (SEQ ID NO: 155) |
| | | -X3- |
| | | DKENVLQKIYEIMKELERLGHAEASMQVSDLIYEFM |
| | | KTKDENLLEEAERLLEEVKR |
| | | (SEQ ID NO: 135) |
| 2- | MEKKISAWSHPQFEKGGGSGGGSGGSAWSHPQFEKG | X1- |
| PAS16 | GSGSSGELEEQVMHVLDQVSELAHELLHKLTGEELE | ELEEQVMHVLDQVSELAHELLHKLTGEELERAAYFN |
| -3- | RAAYFNWWATEMMLELIKSDDEREIREIEEEARRIL | WWATEMMLELIKSDDEREIREIEEEARRILEHLEEL |
| PAS11 | EHLEELARKGGASPAAPAPASPAGGNLDELHMQMTD | ARK |
| 1_NTS | LVYEALHFAKDEEFQKHVFQLFEKATKAYKNKDRQK | (SEQ ID NO: 101) |
| | LEKVVEELKELLERLLSGGASPAAPAGGDKENVLQK | -X2- |
| | IYEIMKELERLGHAEASMQVSDLIYEFMKTKDENLL | NLDELHMQMTDLVYEALHFAKDEEFQKHVFQLFEKA |
| | EEAERLLEEVKR | TKAYKNKDRQKLEKVVEELKELLERLLS |
| | (SEQ ID NO: 316) | (SEQ ID NO: 155) |
| | | -X3- |
| | | DKENVLQKIYEIMKELERLGHAEASMQVSDLIYEFM |
| | | KTKDENLLEEAERLLEEVKR |
| | | (SEQ ID NO: 135) |
| 2- | MEKKISAWSHPQFEKGGGSGGGSGGSAWSHPQFEKG | X1- |
| PAS11 | GSGSSGELEEQVMHVLDQVSELAHELLHKLTGEELE | ELEEQVMHVLDQVSELAHELLHKLTGEELERAAYFN |
| -3- | RAAYFNWWATEMMLELIKSDDEREIREIEEEARRIL | WWATEMMLELIKSDDEREIREIEEEARRILEHLEEL |
| PAS11 | EHLEELARKGGASPAAPAGGNLDELHMQMTDLVYEA | ARK |
| 1_NTS | LHFAKDEEFQKHVFQLFEKATKAYKNKDRQKLEKVV | (SEQ ID NO: 101) |
| | EELKELLERLLSGGASPAAPAGGDKENVLQKIYEIM | -X2- |
| | KELERLGHAEASMQVSDLIYEFMKTKDENLLEEAER | NLDELHMQMTDLVYEALHFAKDEEFQKHVFQLFEKA |
| | LLEEVKR | TKAYKNKDRQKLEKVVEELKELLERLLS |
| | (SEQ ID NO: 317) | (SEQ ID NO: 155) |
| | | -X3- |
| | | DKENVLQKIYEIMKELERLGHAEASMQVSDLIYEFM |
| | | KTKDENLLEEAERLLEEVKR |
| | | (SEQ ID NO: 135) |
| 2-3- | MEKKISAWSHPQFEKGGGSGGGSGGSAWSHPQFEKG | X1- |
| 1_ | GSGSSGELEEQVMHVLDQVSELAHELLHKLTGEELE | ELEEQVMHVLDQVSELAHELLHKLTGEELERAAYFN |
| PAS | RAAYFNWWATEMMLELIKSDDEREIREIEEEARRIL | WWATEMMLELIKSDDEREIREIEEEARRILEHLEEL |
| 7 | EHLEELARKGGASAGGNLDELHMQMTDLVYEALHFA | ARK |
| | KDEEFQKHVFQLFEKATKAYKNKDRQKLEKVVEELK | (SEQ ID NO: 101) |
| | ELLERLLSGGASAGGDKENVLQKIYEIMKELERLGH | -X2- |
| | AEASMQVSDLIYEFMKTKDENLLEEAERLLEEVKR | NLDELHMQMTDLVYEALHFAKDEEFQKHVFQLFEKA |
| | (SEQ ID NO: 318) | TKAYKNKDRQKLEKVVEELKELLERLLS |
| | | (SEQ ID NO: 155) |
| | | -X3- |
| | | DKENVLQKIYEIMKELERLGHAEASMQVSDLIYEFM |
| | | KTKDENLLEEAERLLEEVKR |
| | | (SEQ ID NO: 135) |
| 2-3- | MEKKISAWSHPQFEKGGGSGGGSGGSAWSHPQFEKG | X1- |
| 1_GS7 | GSGSSGELEEQVMHVLDQVSELAHELLHKLTGEELE | ELEEQVMHVLDQVSELAHELLHKLTGEELERAAYFNWW |
| | RAAYFNWWATEMMLELIKSDDEREIREIEEEARRIL | ATEMMLELIKSDDEREIREIEEE2ARRILEHLEELARK |
| | EHLEELARKGGSGGSGGNLDELHMQMTDLVYEALHF | (SEQ ID NO: 101) |
| | AKDEEFQKHVFQLFEKATKAYKNKDRQKLEKVVEEL | -X2- |
| | KELLERLLSGGSGGSGGDKENVLQKIYEIMKELERL | NLDELHMQMTDLVYEALHFAKDEEFQKHVFQLFEKA |
| | GHAEASMQVSDLIYEFMKTKDENLLEEAERLLEEVK | TKAYKNKDRQKLEKVVEELKELLERLLS |
| | R | (SEQ ID NO: 155) |
| | (SEQ ID NO: 319) | -X3- |
| | | DKENVLQKIYEIMKELERLGHAEASMQVSDLIYEFM |
| | | KTKDENLLEEAERLLEEVKR |
| | | (SEQ ID NO: 135) |
| 2-3- | | X1- |
| 1_GS5 | MEKKISAWSHPQFEKGGGSGGGSGGSAWSHPQFEKG | ELEEQVMHVLDQVSELAHELLHKLTGEELERAAYFN |
| | GSGSSGELEEQVMHVLDQVSELAHELLHKLTGEELE | WWATEMMLELIKSDDEREIREIEEEARRILEHLEEL |
| | RAAYFNWWATEMMLELIKSDDEREIREIEEEARRIL | ARK |
| | EHLEELARKGGSGGNLDELHMQMTDLVYEALHFAKD | (SEQ ID NO: 101) |
| | EEFQKHVFQLFEKATKAYKNKDRQKLEKVVEELKEL | -X2- |
| | LERLLSGGSGGDKENVLQKIYEIMKELERLGHAEAS | NLDELHMQMTDLVYEALHFAKDEEFQKHVFQLFEKA |
| | MQVSDLIYEFMKTKDENLLEEAERLLEEVKR | TKAYKNKDRQKLEKVVEELKELLERLLS |
| | (SEQ ID NO: 320) | (SEQ ID NO: 155) |
| | | -X3- |
| | | DKENVLQKIYEIMKELERLGHAEASMQVSDLIYEFM |
| | | KTKDENLLEEAERLLEEVKR |
| | | (SEQ ID NO: 135) |
| 2-3- | MEKKISAWSHPQFEKGGGSGGGSGGSAWSHPQFEKG | X1- |
| 1_ | GSGSSGELEEQVMHVLDQVSELAHELLHKLTGEELE | ELEEQVMHVLDQVSELAHELLHKLTGEELERAAYFN |
| GS11 | RAAYFNWWATEMMLELIKSDDEREIREIEEEARRIL | WWATEMMLELIKSDDEREIREIEEEARRILEHLEEL |
| | EHLEELARKGGSGGSGGSGGNLDELHMQMTDLVYEA | ARK |
| | LHFAKDEEFQKHVFQLFEKATKAYKNKDRQKLEKVV | (SEQ ID NO: 101) |
| | EELKELLERLLSGGSGGSGGSGGDKENVLQKIYEIM | -X2- |
| | KELERLGHAEASMQVSDLIYEFMKTKDENLLEEAER | NLDELHMQMTDLVYEALHFAKDEEFQKHVFQLFEKA |
| | LLEEVKR | TKAYKNKDRQKLEKVVEELKELLERLLS |
| | (SEQ ID NO: 321) | (SEQ ID NO: 155) |
| | | -X3- |
| | | DKENVLQKIYEIMKELERLGHAEASMQVSDLIYEFM |
| | | KTKDENLLEEAERLLEEVKR |
| | | (SEQ ID NO: 135) |
| 2-2- | MEKKISAWSHPQFEKGGGSGGGSGGSAWSHPQFEKG | X1- |
| 2_ | GSGSSGELEEQVMHVLDQVSELAHELLHKLTGEELE | ELEEQVMHVLDQVSELAHELLHKLTGEELERAAYFN |
| PAS11 | RAAYFNWWATEMMLELIKSDDEREIREIEEEARRIL | WWATEMMLELIKSDDEREIREIEEEARRILEHLEEL |
| | EHLEELARKGGASPAAPAGGELEEQVMHVLDQVSEL | ARK |
| | AHELLHKLTGEELERAAYFNWWATEMMLELIKSDDE | (SEQ ID NO: 101) |
| | REIREIEEEARRILEHLEELARKGGASPAAPAGGEL | -X2- |
| | EEQVMHVLDQVSELAHELLHKLTGEELERAAYFNWW | ELEEQVMHVLDQVSELAHELLHKLTGEELERAAYFN |
| | ATEMMLELIKSDDEREIREIEEEARRILEHLEELAR | WWATEMMLELIKSDDEREIREIEEEARRILEHLEEL |
| | K | ARK |
| | (SEQ ID NO: 322) | (SEQ ID NO: 101) |
| | | -X3- |
| | | ELEEQVMHVLDQVSELAHELLHKLTGEELERAAYFN |
| | | WWATEMMLELIKSDDEREIREIEEEARRILEHLEEL |
| | | ARK |
| | | (SEQ ID NO: 101) |
| 2-2- | MEKKISAWSHPQFEKGGGSGGGSGGSAWSHPQFEKG | X1- |
| 2_ | GSGSSGELEEQVMHVLDQVSELAHELLHKLTGEELE | ELEEQVMHVLDQVSELAHELLHKLTGEELERAAYFN |
| GS11 | RAAYFNWWATEMMLELIKSDDEREIREIEEEARRIL | WWATEMMLELIKSDDEREIREIEEEIARRILEHLEE |
| | EHLEELARKGGSGGSGGSGGELEEQVMHVLDQVSEL | LARK |
| | AHELLHKLTGEELERAAYFNWWATEMMLELIKSDDE | (SEQ ID NO: 101) |
| | REIREIEEEARRILEHLEELARKGGSGGSGGSGGEL | -X2- |
| | EEQVMHVLDQVSELAHELLHKLTGEELERAAYFNWW | ELEEQVMHVLDQVSELAHELLHKLTGEELERAAYFN |
| | ATEMMLELIKSDDEREIREIEEEARRILEHLEELAR | WWATEMMLELIKSDDEREIREIEEEARRILEHLEEL |
| | K | ARK |
| | (SEQ ID NO: 323) | (SEQ ID NO: 101) |
| | | -X3- |
| | | ELEEQVMHVLDQVSELAHELLHKLTGEELERAAYFN |
| | | WWATEMMLELIKSDDEREIREIEEEARRILEHLEEL |
| | | ARK |
| | | (SEQ ID NO: 101) |
| 2-2- | MEKKISAWSHPQFEKGGGSGGGSGGSAWSHPQFEKG | X1- |
| 2_GS8 | GSGSSGELEEQVMHVLDQVSELAHELLHKLTGEELE | ELEEQVMHVLDQVSELAHELLHKLTGEELERAAYFN |
| | RAAYFNWWATEMMLELIKSDDEREIREIEEEARRIL | WWATEMMLELIKSDDEREIREIEEEARRILEHLEEL |
| | EHLEELARKGGSGGSGGELEEQVMHVLDQVSELAHE | ARK |
| | LLHKLTGEELERAAYFNWWATEMMLELIKSDDEREI | (SEQ ID NO: 101) |
| | REIEEEARRILEHLEELARKGGSGGSGGELEEQVMH | -X2- |
| | VLDQVSELAHELLHKLTGEELERAAYFNWWATEMML | ELEEQVMHVLDQVSELAHELLHKLTGEELERAAYFN |
| | ELIKSDDEREIREIEEE1ARRILEHLEELARK | WWATEMMLELIKSDDEREIREIEEEARRILEHLEEL |
| | (SEQ ID NO: 324) | ARK |
| | | (SEQ ID NO: 101) |
| | | -X3- |
| | | ELEEQVMHVLDQVSELAHELLHKLTGEELERAAYFN |
| | | WWATEMMLELIKSDDEREIREIEEEARRILEHLEEL |
| | | ARK |
| | | (SEQ ID NO: 101) |
| 2-2- | MEKKISAWSHPQFEKGGGSGGGSGGSAWSHPQFEKG | X1- |
| 2_GS5 | GSGSSGELEEQVMHVLDQVSELAHELLHKLTGEELE | ELEEQVMHVLDQVSELAHELLHKLTGEELERAAYFN |
| | RAAYFNWWATEMMLELIKSDDEREIREIEEEARRIL | WWATEMMLELIKSDDEREIREIEEEARRILEHLEEL |
| | EHLEELARKGGSGGELEEQVMHVLDQVSELAHELLH | ARK |
| | KLTGEELERAAYFNWWATEMMLELIKSDDEREIREI | (SEQ ID NO: 101) |
| | EEEARRILEHLEELARKGGSGGELEEQVMHVLDQVS | -X2- |
| | ELAHELLHKLTGEELERAAYFNWWATEMMLELIKSD | ELEEQVMHVLDQVSELAHELLHKLTGEELERAAYFN |
| | DEREIREIEEEARRILEHLEELARK | WWATEMMLELIKSDDEREIREIEEEARRILEHLEEL |
| | (SEQ ID NO: 325) | ARK |
| | | (SEQ ID NO: 101) |
| | | -X3- |
| | | ELEEQVMHVLDQVSELAHELLHKLTGEELERAAYFN |
| | | WWATEMMLELIKSDDEREIREIEEEARRILEHLEELA |
| | | RK |
| | | (SEQ ID NO: 101) |
| 2-3-1_ | MEKKISAWSHPQFEKGGGSGGGSGGSAWSHPQFEKG | X1- |
| GGG | GSGSSGELEEQVMHVLDQVSELAHELLHKLTGEELE | ELEEQVMHVLDQVSELAHELLHKLTGEELERAAYFN |
| GS15 | RAAYFNWWATEMMLELIKSDDEREIREIEEEARRIL | WWATEMMLELIKSDDEREIREIEEEARRILEHLEEL |
| | EHLEELARKGGSGGGGSGGGGSGGNLDELHMQMTDL | ARK |
| | VYEALHFAKDEEFQKHVFQLFEKATKAYKNKDRQKL | (SEQ ID NO: 101) |
| | EKVVEELKELLERLLSGGSGGGGSGGGGSGGDKENV | -X2- |
| | LQKIYEIMKELERLGHAEASMQVSDLIYEFMKTKDE | NLDELHMQMTDLVYEALHFAKDEEFQKHVFQLFEKA |
| | NLLEEAERLLEEVKR | TKAYKNKDRQKLEKVVEELKELLERLLS |
| | (SEQ ID NO: 326) | (SEQ ID NO: 155) |
| | | -X3- |
| | | DKENVLQKIYEIMKELERLGHAEASMQVSDLIYEFM |
| | | KTKDENLLEEAERLLEEVKR |
| | | (SEQ ID NO: 135) |
| 2-3-1_ | MEKKISAWSHPQFEKGGGSGGGSGGSAWSHPQFEKG | X1- |
| GGG | GSGSSGELEEQVMHVLDQVSELAHELLHKLTGEELE | ELEEQVMHVLDQVSELAHELLHKLTGEELERAAYFNW |
| GS12 | RAAYFNWWATEMMLELIKSDDEREIREIEEEARRIL | WATEMMLELIKSDDEREIREIEEEARRILEHLEELA |
| | EHLEELARKGGSGGGGSGGGGNLDELHMQMTDLVYE | RK |
| | ALHFAKDEEFQKHVFQLFEKATKAYKNKDRQKLEKV | (SEQ ID NO: 101) |
| | VEELKELLERLLSGGSGGGGSGGGGDKENVLQKIYE | -X2- |
| | IMKELERLGHAEASMQVSDLIYEFMKTKDENLLEEA | NLDELHMQMTDLVYEALHFAKDEEFQKHVFQLFEKA |
| | ERLLEEVKR | TKAYKNKDRQKLEKVVEELKELLERLLS |
| | (SEQ ID NO: 327) | (SEQ ID NO: 155) |
| | | -X3- |
| | | DKENVLQKIYEIMKELERLGHAEASMQVSDLIYEFM |
| | | KTKDENLLEEAERLLEEVKR |
| | | (SEQ ID NO: 135) |
| 2-3-1_ | MEKKISAWSHPQFEKGGGSGGGSGGSAWSHPQFEKG | X1- |
| GGG | GSGSSGELEEQVMHVLDQVSELAHELLHKLTGEELE | ELEEQVMHVLDQVSELAHELLHKLTGEELERAAYFN |
| GS9 | RAAYFNWWATEMMLELIKSDDEREIREIEEEARRIL | WWATEMMLELIKSDDEREIREIEEEARRILEHLEEL |
| | EHLEELARKGGGGSGGGGNLDELHMQMTDLVYEALH | ARK |
| | FAKDEEFQKHVFQLFEKATKAYKNKDRQKLEKVVEE | (SEQ ID NO: 101) |
| | LKELLERLLSGGGGSGGGGDKENVLQKIYEIMKELE | -X2- |
| | RLGHAEASMQVSDLIYEFMKTKDENLLEEAERLLEE | NLDELHMQMTDLVYEALHFAKDEEFQKHVFQLFEKA |
| | VKR | TKAYKNKDRQKLEKVVEELKELLERLLS |
| | (SEQ ID NO: 328) | (SEQ ID NO: 155) |
| | | -X3- |
| | | DKENVLQKIYEIMKELERLGHAEASMQVSDLIYEFM |
| | | KTKDENLLEEAERLLEEVKR |
| | | (SEQ ID NO: 135) |
| 2-3-1_ | MEKKISAWSHPQFEKGGGSGGGSGGSAWSHPQFEKG | X1- |
| GGG | GSGSSGELEEQVMHVLDQVSELAHELLHKLTGEELE | ELEEQVMHVLDQVSELAHELLHKLTGEELERAAYFN |
| GS7 | RAAYFNWWATEMMLELIKSDDEREIREIEEEARRIL | WWATEMMLELIKSDDEREIREIEEEARRILEHLEEL |
| | EHLEELARKGGGSGGGNLDELHMQMTDLVYEALHFA | ARK |
| | KDEEFQKHVFQLFEKATKAYKNKDRQKLEKVVEELK | (SEQ ID NO: 101) |
| | ELLERLLSGGGSGGGDKENVLQKIYEIMKELERLGH | -X2- |
| | AEASMQVSDLIYEFMKTKDENLLEEAERLLEEVKR | NLDELHMQMTDLVYEALHFAKDEEFQKHVFQLFEKA |
| | (SEQ ID NO: 329) | TKAYKNKDRQKLEKVVEELKELLERLLS |
| | | (SEQ ID NO: 155) |
| | | -X3- |
| | | DKENVLQKIYEIMKELERLG |
| | | (SEQ ID NO: 135) |
| | | HAEASMQVSDLIYEFMKTKDENLLEEAERLLEEVKR |
| 1-1_ | MEKKIGGGDKENVLQKIYEIMKELERLGHAEASMQV | X1- |
| GGG | SDLIYEFMKTKDENLLEEAERLLEEVKRGGSGGGGS | DKENVLQKIYEIMKELERLGHAEASMQVSDLIYEFM |
| GS25 | GGGGSGGGGSGGGGSGGDKENVLQKIYEIMKELERL | KTKDENLLEEAERLLEEVKR |
| | GHAEASMQVSDLIYEFMKTKDENLLEEAERLLEEVK | (SEQ ID NO: 135) |
| | RGGGSGGGSAWSHPQFEKGGGSGGGSGGSAWSHPQF | -X2- |
| | EK | DKENVLQKIYEIMKELERLGHAEASMQVSDLIYEFM |
| | (SEQ ID NO: 330} | KTKDENLLEEAERLLEEVKR |
| | | (SEQ ID NO: 135)-X3 |
| 1-1_ | MEKKIGGGDKENVLQKIYEIMKELERLGHAEASMQV | X1- |
| GGG | SDLIYEFMKTKDENLLEEAERLLEEVKRGGSGGGGS | DKENVLQKIYEIMKELERLGHAEASMQVSDLIYEFM |
| GS20 | GGGGSGGGGSGGDKENVLQKIYEIMKELERLGHAEA | KTKDENLLEEAERLLEEVKR |
| | SMQVSDLIYEFMKTKDENLLEEAERLLEEVKRGGGS | (SEQ ID NO: 135) |
| | GGGSAWSHPQFEKGGGSGGGSGGSAWSHPQFEK | -X2- |
| | (SEQ ID NO: 331) | DKENVLQKIYEIMKELERLGHAEASMQVSDLIYEFM |
| | | KTKDENLLEEAERLLEEVKR |
| | | (SEQ ID NO: 135)-X3 |
| 1-1_ | MEKKIGGGDKENVLQKIYEIMKELERLGHAEASMQV | X1- |
| GGG | SDLIYEFMKTKDENLLEEAERLLEEVKRGGSGGGGS | DKENVLQKIYEIMKELERLGHAEASMQVSDLIYEFM |
| GS15 | GGGGSGGDKENVLQKIYEIMKELERLGHAEASMQVS | KTKDENLLEEAERLLEEVKR |
| | DLIYEFMKTKDENLLEEAERLLEEVKRGGGSGGGSA | (SEQ ID NO: 135) |
| | WSHPQFEKGGGSGGGSGGSAWSHPQFEK | -X2- |
| | (SEQ ID NO: 332) | DKENVLQKIYEIMKELERLGHAEASMQVSDLIYEFM |
| | | KTKDENLLEEAERLLEEVKR |
| | | (SEQ ID NO: 135)-X3 |
| 1-1_ | MEKKIGGGDKENVLQKIYEIMKELERLGHAEASMQV | X1- |
| GGG | SDLIYEFMKTKDENLLEEAERLLEEVKRGGSGGGGS | DKENVLQKIYEIMKELERLGHAEASMQVSDLIYEFM |
| GS10 | GGDKENVLQKIYEIMKELERLGHAEASMQVSDLIYE | KTKDENLLEEAERLLEEVKR |
| | FMKTKDENLLEEAERLLEEVKRGGGSGGGSAWSHPQ | (SEQ ID NO: 135) |
| | FEKGGGSGGGSGGSAWSHPQFEK | -X2- |
| | (SEQ ID NO: 333) | DKENVLQKIYEIMKELERLGHAEASMQVSDLIYEFM |
| | | KTKDENLLEEAERLLEEVKR |
| | | (SEQ ID NO: 135)-X3 |
| 2-1_ | MEKKIGGGELEEQVMHVLDQVSELAHELLHKLTGEE | X1- |
| GGG | LERAAYFNWWATEMMLELIKSDDEREIREIEEEARR | ELEEQVMHVLDQVSELAHELLHKLTGEELERAAYFN |
| GS10 | ILEHLEELARKGGSGGGGSGGDKENVLQKIYEIMKE | WWATEMMLELIKSDDEREIREIEEEARRILEHLEEL |
| | LERLGHAEASMQVSDLIYEFMKTKDENLLEEAERLL | ARK |
| | EEVKRGGGSGGGSAWSHPQFEKGGGSGGGSGGSAWS | (SEQ ID NO: 101) |
| | HPQFEK | -X2- |
| | (SEQ ID NO: 334) | DKENVLQKIYEIMKELERLGHAEASMQVSDLIYEFM |
| | | KTKDENLLEEAERLLEEVKR |
| | | (SEQ ID NO: 135)-X3 |
| 3-1_ | MEKKIGGGNLDELHMQMTDLVYEALHFAKDEEFQKH | X1- |
| GGG | VFQLFEKATKAYKNKDRQKLEKVVEELKELLERLLS | NLDELHMQMTDLVYEALHFAKDEEFQKHVFQLFEKA |
| GS10 | GGSGGGGSGGDKENVLQKIYEIMKELERLGHAEASM | TKAYKNKDRQKLEKVVEELKELLERLLS |
| | QVSDLIYEFMKTKDENLLEEAERLLEEVKRGGGSGG | (SEQ ID NO: 155) |
| | GSAWSHPQFEKGGGSGGGSGGSAWSHPQFEK | -X2- |
| | (SEQ ID NO: 335) | DKENVLQKIYEIMKELERLGHAEASMQVSDLIYEFM |
| | | KTKDENLLEEAERLLEEVKR |
| | | (SEQ ID NO: 135)-X3 |
| 2-3_ | MEKKIGGGELEEQVMHVLDQVSELAHELLHKLTGEE | X1- |
| GGG | LERAAYFNWWATEMMLELIKSDDEREIREIEEEARR | ELEEQVMHVLDQVSELAHELLHKLTGEELERAAYFN |
| GS10 | ILEHLEELARKGGSGGGGSGGNLDELHMQMTDLVYE | WWATEMMLELIKSDDEREIREIEEEARRILEHLEEL |
| | ALHFAKDEEFQKHVFQLFEKATKAYKNKDRQKLEKV | ARK |
| | VEELKELLERLLSGGGSGGGSAWSHPQFEKGGGSGG | (SEQ ID NO: 101) |
| | GSGGSAWSHPQFEK | -X2- |
| | (SEQ ID NO: 336) | NLDELHMQMTDLVYEALHFAKDEEFQKHVFQLFEKA |
| | | TKAYKNKDRQKLEKVVEELKELLERLLS |
| | | (SEQ ID NO: 155)-X3 |
| 3-2_ | MEKKIGGGNLDELHMQMTDLVYEALHFAKDEEFQKH | X1- |
| GGG | VFQLFEKATKAYKNKDRQKLEKVVEELKELLERLLS | NLDELHMQMTDLVYEALHFAKDEEFQKHVFQLFEKA |
| GS10 | GGSGGGGSGGELEEQVMHVLDQVSELAHELLHKLTG | TKAYKNKDRQKLEKVVEELKELLERLLS |
| | EELERAAYFNWWATEMMLELIKSDDEREIREIEEEA | (SEQ ID NO: 155) |
| | RRILEHLEELARKGGGSGGGSAWSHPQFEKGGGSGG | -X2- |
| | GSGGSAWSHPQFEK | ELEEQVMHVLDQVSELAHELLHKLTGEELERAAYFN |
| | (SEQ ID NO: 337) | WWATEMMLELIKSDDEREIREIEEEARRILEHLEEL |
| | | ARK |
| | | (SEQ ID NO: 101)-X3 |
| 2-3-1_ | MEKKIGGGELEEQVMHVLDQVSELAHELLHKLTGEE | X1- |
| GGG | LERAAYFNWWATEMMLELIKSDDEREIREIEEEARR | ELEEQVMHVLDQVSELAHELLHKLTGEELERAAYFN |
| GS10 | ILEHLEELARKGGSGGGGSGGNLDELHMQMTDLVYE | WWATEMMLELIKSDDEREIREIEEEARRILEHLEEL |
| | ALHFAKDEEFQKHVFQLFEKATKAYKNKDRQKLEKV | ARK |
| | VEELKELLERLLSGGSGGGGSGGDKENVLQKIYEIM | (SEQ ID NO: 101) |
| | KELERLGHAEASMQVSDLIYEFMKTKDENLLEEAER | -X2- |
| | LLEEVKRGGGSGGGSAWSHPQFEKGGGSGGGSGGSA | NLDELHMQMTDLVYEALHFAKDEEFQKHVFQLFEKA |
| | WSHPQFEK | TKAYKNKDRQKLEKVVEELKELLERLLS |
| | (SEQ ID NO: 338) | (SEQ ID NO: 155) |
| | | -X3- |
| | | DKENVLQKIYEIMKELERLGHAEASMQVSDLIYEFM |
| | | KTKDENLLEEAERLLEEVKR |
| | | (SEQ ID NO: 135)-X4 |
| 3-2-1_ | MEKKIGGGNLDELHMQMTDLVYEALHFAKDEEFQKH | X1- |
| GGG | VFQLFEKATKAYKNKDRQKLEKVVEELKELLERLLS | NLDELHMQMTDLVYEALHFAKDEEFQKHVFQLFEKA |
| GS10 | GGSGGGGSGGELEEQVMHVLDQVSELAHELLHKLTG | TKAYKNKDRQKLEKVVEELKELLERLLS |
| | EELERAAYFNWWATEMMLELIKSDDEREIREIEEEA | (SEQ ID NO: 155) |
| | RRILEHLEELARKGGSGGGGSGGDKENVLQKIYEIM | -X2- |
| | KELERLGHAEASMQVSDLIYEFMKTKDENLLEEAER | ELEEQVMHVLDQVSELAHELLHKLTGEELERAAYFN |
| | LLEEVKRGGGSGGGSAWSHPQFEKGGGSGGGSGGSA | WWATEMMLELIKSDDEREIREIEEEARRILEHLEEL |
| | WSHPQFEK | ARK |
| | (SEQ ID NO: 339) | (SEQ ID NO: 101) |
| | | -X3- |
| | | DKENVLQKIYEIMKELERLGHAEASMQVSDLIYEFM |
| | | KTKDENLLEEAERLLEEVKR |
| | | (SEQ ID NO: 135)-X4 |
| 2-3-1_ | MEKKIGGGELEEQVMHVLDQVSELAHELLHKLTGEE | X1- |
| GGG | LERAAYFNWWATEMMLELIKSDDEREIREIEEEARR | ELEEQVMHVLDQVSELAHELLHKLTGEELERAAYFN |
| GS15 | ILEHLEELARKGGSGGGGSGGGGSGGNLDELHMQMT | WWATEMMLELIKSDDEREIREIEEEARRILEHLEEL |
| | DLVYEALHFAKDEEFQKHVFQLFEKATKAYKNKDRQ | ARK |
| | KLEKVVEELKELLERLLSGGSGGGGSGGGGSGGDKE | (SEQ ID NO: 101) |
| | NVLQKIYEIMKELERLGHAEASMQVSDLIYEFMKTK | -X2- |
| | DENLLEEAERLLEEVKRGGGSGGGSAWSHPQFEKGG | NLDELHMQMTDLVYEALHFAKDEEFQKHVFQLFEKA |
| | GSGGGSGGSAWSHPQFEK | TKAYKNKDRQKLEKVVEELKELLERLLS |
| | (SEQ ID NO: 340) | (SEQ ID NO: 155) |
| | | -X3- |
| | | DKENVLQKIYEIMKELERLGHAEASMQVSDLIYEFM |
| | | KTKDENLLEEAERLLEEVKR |
| | | (SEQ ID NO: 135)-X4 |
| 3-2- | MEKKIGGGNLDELHMQMTDLVYEALHFAKDEEFQKH | X1- |
| 1_ | VFQLFEKATKAYKNKDRQKLEKVVEELKELLERLLS | NLDELHMQMTDLVYEALHFAKDEEFQKHVFQLFEKA |
| GGG | GGSGGGGSGGGGSGGELEEQVMHVLDQVSELAHELL | TKAYKNKDRQKLEKVVEELKELLERLLS |
| GS15 | HKLTGEELERAAYFNWWATEMMLELIKSDDEREIRE | (SEQ ID NO: 155) |
| | IEEEARRILEHLEELARKGGSGGGGSGGGGSGGDKE | -X2- |
| | NVLQKIYEIMKELERLGHAEASMQVSDLIYEFMKTK | ELEEQVMHVLDQVSELAHELLHKLTGEELERAAYFN |
| | DENLLEEAERLLEEVKRGGGSGGGSAWSHPQFEKGG | WWATEMMLELIKSDDEREIREIEEEARRILEHLEEL |
| | GSGGGSGGSAWSHPQFEK | ARK |
| | (SEQ ID NO: 341) | (SEQ ID NO: 101) |
| | | -X3- |
| | | DKENVLQKIYEIMKELERLGHAEASMQVSDLIYEFM |
| | | KTKDENLLEEAERLLEEVKR |
| | | (SEQ ID NO: 135)-X4 |
| LCB3- | MEKKINLDELHMQMTDLVYEALHFAKDEEFQKHVFQ | X1- |
| LCB1_ | LFEKATKAYKNKDRQKLEKVVEELKELLERLLSGGA | NLDELHMQMTDLVYEALHFAKDEEFQKHVFQLFEKA |
| PAS12 | SPAAPAPGGDKENVLQKIYEIMKELERLGHAEASMQ | TKAYKNKDRQKLEKVVEELKELLERLLS |
| | VSDLIYEFMKTKDENLLEEAERLLEEVKRGGSGSSG | (SEQ ID NO: 155) |
| | SAWSHPQFEKGGGSGGGSGGSAWSHPQFEK | -X2- |
| | (SEQ ID NO: 342) | DKENVLQKIYEIMKELERLGHAEASMQVSDLIYEFM |
| | | KTKDENLLEEAERLLEEVKR |
| | | (SEQ ID NO: 135)-X3 |
| AHB2- | MEKKIELEEQVMHVLDQVSELAHELLHKLTGEELER | X1- |
| LCB1_ | AAYFNWWATEMMLELIKSDDEREIREIEEEARRILE | ELEEQVMHVLDQVSELAHELLHKLTGEELERAAYFN |
| PAS12 | HLEELARKGGASPAAPAPGGDKENVLQKIYEIMKEL | WWATEMMLELIKSDDEREIREIEEEARRILEHLEEL |
| | ERLGHAEASMQVSDLIYEFMKTKDENLLEEAERLLE | ARK |
| | EVKRGGSGSSGSAWSHPQFEKGGGSGGGSGGSAWSH | (SEQ ID NO: 101) |
| | PQFEK | -X2- |
| | (SEQ ID NO: 343) | DKENVLQKIYEIMKELERLGHAEASMQVSDLIYEFM |
| | | KTKDENLLEEAERLLEEVKR |
| | | (SEQ ID NO: 135)-X3 |
| AHB2- | MEKKIELEEQVMHVLDQVSELAHELLHKLTGEELER | X1- |
| LCB3_ | AAYFNWWATEMMLELIKSDDEREIREIEEEARRILE | ELEEQVMHVLDQVSELAHELLHKLTGEELERAAYFN |
| PAS12 | HLEELARKGGASPAAPAPGGNLDELHMQMTDLVYEA | WWATEMMLELIKSDDEREIREIEEEARRILEHLEEL |
| | LHFAKDEEFQKHVFQLFEKATKAYKNKDRQKLEKVV | ARK |
| | EELKELLERLLSGGSGSSGSAWSHPQFEKGGGSGGG | (SEQ ID NO: 101) |
| | SGGSAWSHPQFEK | -X2- |
| | (SEQ ID NO: 344) | NLDELHMQMTDLVYEALHFAKDEEFQKHVFQLFEKA |
| | | TKAYKNKDRQKLEKVVEELKELLERLLS |
| | | (SEQ ID NO: 155)-X3 |
| LCB3- | MEKKINLDELHMQMTDLVYEALHFAKDEEFQKHVFQ | X1- |
| AHB2_ | LFEKATKAYKNKDRQKLEKVVEELKELLERLLSGGA | NLDELHMQMTDLVYEALHFAKDEEFQKHVFQLFEKA |
| PAS12 | SPAAPAPGGELEEQVMHVLDQVSELAHELLHKLTGE | TKAYKNKDRQKLEKVVEELKELLERLLS |
| | ELERAAYFNWWATEMMLELIKSDDEREIREIEEEAR | (SEQ ID NO: 155) |
| | RILEHLEELARKGGSGSSGSAWSHPQFEKGGGSGGG | -X2- |
| | SGGSAWSHPQFEK | ELEEQVMHVLDQVSELAHELLHKLTGEELERAAYFN |
| | (SEQ ID NO: 345) | WWATEMMLELIKSDDEREIREIEEEARRILEHLEEL |
| | | ARK |
| | | (SEQ ID NO: 101)-X3 |
| AHB2- | MEKKIELEEQVMHVLDQVSELAHELLHKLTGEELER | X1- |
| LCB3- | AAYFNWWATEMMLELIKSDDEREIREIEEEARRILE | ELEEQVMHVLDQVSELAHELLHKLTGEELERAAYFN |
| LCB1_ | HLEELARKGGASPAAPAPGGNLDELHMQMTDLVYEA | WWATEMMLELIKSDDEREIREIEEEARRILEHLEEL |
| PAS12 | LHFAKDEEFQKHVFQLFEKATKAYKNKDRQKLEKVV | ARK |
| | EELKELLERLLSGGASPAAPAPGGDKENVLQKIYEI | (SEQ ID NO: 101) |
| | MKELERLGHAEASMQVSDLIYEFMKTKDENLLEEAE | -X2- |
| | RLLEEVKRGGSGSSGSAWSHPQFEKGGGSGGGSGGS | NLDELHMQMTDLVYEALHFAKDEEFQKHVFQLFEKA |
| | AWSHPQFEK | TKAYKNKDRQKLEKVVEELKELLERLLS |
| | (SEQ ID NO: 346) | (SEQ ID NO: 155) |
| | | -X3- |
| | | DKENVLQKIYEIMKELERLGHAEASMQVSDLIYEFM |
| | | KTKDENLLEEAERLLEEVKR |
| | | (SEQ ID NO: 135)-X4 |
| LCB3- | MEKKINLDELHMQMTDLVYEALHFAKDEEFQKHVFQ | X1- |
| AHB2- | LFEKATKAYKNKDRQKLEKVVEELKELLERLLSGGA | NLDELHMQMTDLVYEALHFAKDEEFQKHVFQLFEKA |
| LCB1_ | SPAAPAPGGELEEQVMHVLDQVSELAHELLHKLTGE | TKAYKNKDRQKLEKVVEELKELLERLLS |
| PAS12 | ELERAAYFNWWATEMMLELIKSDDEREIREIEEEAR | (SEQ ID NO: 155) |
| | RILEHLEELARKGGASPAAPAPGGDKENVLQKIYEI | -X2- |
| | MKELERLGHAEASMQVSDLIYEFMKTKDENLLEEAE | ELEEQVMHVLDQVSELAHELLHKLTGEELERAAYFN |
| | RLLEEVKRGGSGSSGSAWSHPQFEKGGGSGGGSGGS | WWATEMMLELIKSDDEREIREIEEEARRILEHLEEL |
| | AWSHPQFEK | ARK |
| | (SEQ ID NO: 347) | (SEQ ID NO: 101) |
| | | -X3- |
| | | DKENVLQKIYEIMKELERLGHAEASMQVSDLIYEFM |
| | | KTKDENLLEEAERLLEEVKR |
| | | (SEQ ID NO: 135)-X4 |
| LCB3- | MEKKINLDELHMQMTDLVYEALHFAKDEEFQKHVFQ | X1- |
| AHB2- | LFEKATKAYKNKDRQKLEKVVEELKELLERLLSGGA | NLDELHMQMTDLVYEALHFAKDEEFQKHVFQLFEKA |
| LCB1_ | SPAAPAPASPAAPAPSAPAGGELEEQVMHVLDQVSE | TKAYKNKDRQKLEKVVEELKELLERLLS |
| PAS24 | LAHELLHKLTGEELERAAYFNWWATEMMLELIKSDD | (SEQ ID NO: 155) |
| | EREIREIEEEARRILEHLEELARKGGASPAAPAPAS | -X2- |
| | PAAPAPSAPAGGDKENVLQKIYEIMKELERLGHAEA | ELEEQVMHVLDQVSELAHELLHKLTGEELERAAYFN |
| | SMQVSDLIYEFMKTKDENLLEEAERLLEEVKRGGSG | WWATEMMLELIKSDDEREIREIEEEARRILEHLEEL |
| | SSGSAWSHPQFEKGGGSGGGSGGSAWSHPQFEK | ARK |
| | (SEQ ID NO: 348) | (SEQ ID NO: 101) |
| | | -X3- |
| | | DKENVLQKIYEIMKELERLGHAEASMQVSDLIYEFM |
| | | KTKDENLLEEAERLLEEVKR |
| | | (SEQ ID NO: 135)-X4 |
| AHB2v | MEKKIELEEQVMHVLDQVSELAHELLHKLTGEELER | X1- |
| 2- | AAYFNWWATEMMLELIKSDDEREIREIEEEAARILE | ELEEQVMHVLDQVSELAHELLHKLTGEELERAAYFN |
| LCB1 | HLEELARTGGASPAAPAPGGDKENVLQKIYEIMKEL | WWATEMMLELIKSDDEREIREIEEEAARILEHLEEL |
| PAS12 | ERLGHAEASMQVSDLIYEFMKTKDENLLEEAERLLE | ART |
| | EVKRGGSGSSGSAWSHPQFEKGGGSGGGSGGSAWSH | (SEQ ID NO: 164) |
| | PQFEK | -X2- |
| | (SEQ ID NO: 349) | DKENVLQKIYEIMKELERLGHAEASMQVSDLIYEFM |
| | | KTKDENLLEEAERLLEEVKR |
| | | (SEQ ID NO: 135)-X3 |
| AHB2v | MEKKIELEEQVMHVLDQVSELAHELLHKLTGEELER | X1- |
| 2- | AAYFNWWATEMMLELIKSDDEREIREIEEEAARILE | ELEEQVMHVLDQVSELAHELLHKLTGEELERAAYFN |
| LCB3 | HLEELARTGGASPAAPAPGGNLDELHMQMTDLVYEA | WWATEMMLELIKSDDEREIREIEEEAARILEHLEEL |
| PAS12 | LHFAKDEEFQKHVFQLFEKATKAYKNKDRQKLEKVV | ART |
| | EELKELLERLLSGGSGSSGSAWSHPQFEKGGGSGGG | (SEQ ID NO: 164) |
| | SGGSAWSHPQFEK | -X2- |
| | (SEQ ID NO: 350) | NLDELHMQMTDLVYEALHFAKDEEFQKHVFQLFEKA |
| | | TKAYKNKDRQKLEKVVEELKELLERLLS |
| | | (SEQ ID NO: 155)-X3 |
| LCB3- | MEKKINLDELHMQMTDLVYEALHFAKDEEFQKHVFQ | X1- |
| AHB2v | LFEKATKAYKNKDRQKLEKVVEELKELLERLLSGGA | NLDELHMQMTDLVYEALHFAKDEEFQKHVFQLFEKA |
| 2_PAS | SPAAPAPGGELEEQVMHVLDQVSELAHELLHKLTGE | TKAYKNKDRQKLEKVVEELKELLERLLS |
| 12 | ELERAAYFNWWATEMMLELIKSDDEREIREIEEEAA | (SEQ ID NO: 155) |
| | RILEHLEELARTGGSGSSGSAWSHPQFEKGGGSGGG | -X2- |
| | SGGSAWSHPQFEK | ELEEQVMHVLDQVSELAHELLHKLTGEELERAAYFN |
| | (SEQ ID NO: 351) | WWATEMMLELIKSDDEREIREIEEEAARILEHLEEL |
| | | ART |
| | | (SEQ ID NO: 164)-X3 |
| AHB2v | MEKKIELEEQVMHVLDQVSELAHELLHKLTGEELER | X1- |
| 2- | AAYFNWWATEMMLELIKSDDEREIREIEEEAARILE | ELEEQVMHVLDQVSELAHELLHKLTGEELERAAYFN |
| LCB3- | HLEELARTGGASPAAPAPGGNLDELHMQMTDLVYEA | WWATEMMLELIKSDDEREIREIEEEAARILEHLEEL |
| LCB1 | LHFAKDEEFQKHVFQLFEKATKAYKNKDRQKLEKVV | ART |
| PAS12 | EELKELLERLLSGGASPAAPAPGGDKENVLQKIYEI | (SEQ ID NO: 164J |
| | MKELERLGHAEASMQVSDLIYEFMKTKDENLLEEAE | -X2- |
| | RLLEEVKRGGSGSSGSAWSHPQFEKGGGSGGGSGGS | NLDELHMQMTDLVYEALHFAKDEEFQKHVFQLFEKA |
| | AWSHPQFEK | TKAYKNKDRQKLEKVVEELKELLERLLS |
| | (SEQ ID NO: 352) | (SEQ ID NO: 155) |
| | | -X3- |
| | | DKENVLQKIYEIMKELERLGHAEASMQVSDLIYEFM |
| | | KTKDENLLEEAERLLEEVKR |
| | | (SEQ ID NO: 135)-X4 |
| LCB3- | MEKKINLDELHMQMTDLVYEALHFAKDEEFQKHVFQ | X1- |
| AHB2v | LFEKATKAYKNKDRQKLEKVVEELKELLERLLSGGA | NLDELHMQMTDLVYEALHFAKDEEFQKHVFQLFEKA |
| 2- | SPAAPAPGGELEEQVMHVLDQVSELAHELLHKLTGE | TKAYKNKDRQKLEKVVEELKELLERLLS |
| LCB1 | ELERAAYFNWWATEMMLELIKSDDEREIREIEEEAA | (SEQ ID NO: 155) |
| PAS12 | RILEHLEELARTGGASPAAPAPGGDKENVLQKIYEI | -X2- |
| | MKELERLGHAEASMQVSDLIYEFMKTKDENLLEEAE | ELEEQVMHVLDQVSELAHELLHKLTGEELERAAYFN |
| | RLLEEVKRGGSGSSGSAWSHPQFEKGGGSGGGSGGS | WWATEMMLELIKSDDEREIREIEEEAARILEHLEEL |
| | AWSHPQFEK | ART |
| | (SEQ ID NO: 353) | (SEQ ID NO: 164) |
| | | -X3- |
| | | DKENVLQKIYEIMKELERLGHAEASMQVSDLIYEFM |
| | | KTKDENLLEEAERLLEEVKR |
| | | (SEQ ID NO: 135)-X4 |
| AHB2v | MEKKISAWSHPQFEKGGGSGGGSGGSAWSHPQFEKG | X1- |
| 2- | GSGSSGELEEQVMHVLDQVSELAHELLHKLTGEELE | ELEEQVMHVLDQVSELAHELLHKLTGEELERAAYFN |
| LCB3- | RAAYFNWWATEMMLELIKSDDEREIREIEEEAARIL | WWATEMMLELIKSDDEREIREIEEEAARILEHLEEL |
| LCB1_ | EHLEELARTGGASPAAPAPASPAAPAPSAPAGGNLD | ART |
| PAS24 | ELHMQMTDLVYEALHFAKDEEFQKHVFQLFEKATKA | (SEQ ID NO: 164) |
| | YKNKDRQKLEKVVEELKELLERLLSGGASPAAPAPA | -X2- |
| | SPAAPAPSAPAGGDKENVLQKIYEIMKELERLGHAE | NLDELHMQMTDLVYEALHFAKDEEFQKHVFQLFEKA |
| | ASMQVSDLIYEFMKTKDENLLEEAERLLEEVKR | TKAYKNKDRQKLEKVVEELKELLERLLS |
| | (SEQ ID NO: 354) | (SEQ ID NO: 155) |
| | | -X3- |
| | | DKENVLQKIYEIMKELERLGHAEASMQVSDLIYEFM |
| | | KTKDENLLEEAERLLEEVKR |
| | | (SEQ ID NO: 135) |
| LCB3- | MEKKINLDELHMQMTDLVYEALHFAKDEEFQKHVFQ | X1- |
| AHB2v | LFEKATKAYKNKDRQKLEKVVEELKELLERLLSGGA | NLDELHMQMTDLVYEALHFAKDEEFQKHVFQLFEKA |
| 2- | SPAAPAPASPAAPAPSAPAGGELEEQVMHVLDQVSE | TKAYKNKDRQKLEKVVEELKELLERLLS |
| LCB1_ | LAHELLHKLTGEELERAAYFNWWATEMMLELIKSDD | (SEQ ID NO: 155) |
| PAS24 | EREIREIEEEAARILEHLEELARTGGASPAAPAPAS | -X2- |
| | PAAPAPSAPAGGDKENVLQKIYEIMKELERLGHAEA | ELEEQVMHVLDQVSELAHELLHKLTGEELERAAYFN |
| | SMQVSDLIYEFMKTKDENLLEEAERLLEEVKRGGSG | WWATEMMLELIKSDDEREIREIEEEAARILEHLEEL |
| | SSGSAWSHPQFEKGGGSGGGSGGSAWSHPQFEK | ART |
| | (SEQ ID NO: 355) | (SEQ ID NO: 164) |
| | | -X3- |
| | | DKENVLQKIYEIMKELERLGHAEASMQVSDLIYEFM |
| | | KTKDENLLEEAERLLEEVKR |
| | | (SEQ ID NO: |

TABLE 8A

| SEQ ID | Name | Sequence |
|---|---|---|
| 51 | 1GS1 | DKENILQKIYEIMKTLDQLGHAEASMQVSDLIYEFMKQGDERLLEEAERLLEEVERG |
| | | GGGSGGGGSGGGGSGGGGSGGGGSGGGGSGGGGSGGGGSGGGGSGGGGSGGGGSGGG |
| | | GSGGGGSGGGGSGGGGSDKENILQKIYEIMKTLDQLGHAEASMQVSDLIYEFMKQGD |
| | | ERLLEEAERLLEEVER |
| 52 | 1PRO1 | DKENILQKIYEIMKTLDQLGHAEASMQVSDLIYEFMKQGDERLLEEAERLLEEVERA |
| | | GSGGSGGSGGSPVPSTPPTPSPSTPPTPSPSPVPSTPPTPSPSTPPTPSPSPVPSTP |
| | | PTPSPSTPPTPSPSASGDKENILQKIYEIMKTLDQLGHAEASMQVSDLIYEFMKQGD |
| | | ERLLEEAERLLEEVER |
| 53 | 3GS3 | NDDELHMQMTDLVYEALHFAKDEEIQKHVFQLFEKATKAYKNKDRQKLEKVVEELKE |
| | | LLERLLSGGGGSGGGGSGGGGSGGGGSGGGGSGGGGSGGGGSGGGGSGGGGSGGGGS |
| | | GGGGSGGGGSGGGGSGGGGSGGGGSNDDELHMQMTDLVYEALHFAKDEEIQKHVFQL |
| | | FEKATKAYKNKDROKLEKVVEELKELLERLLS |
| 54 | 3PRO3 | NDDELHMQMTDLVYEALHFAKDEEIQKHVFQLFEKATKAYKNKDRQKLEKVVEELKE |
| | | LLERLLSAGSGGSGGSGGSPVPSTPPTPSPSTPPTPSPSPVPSTPPTPSPSTPPTPS |
| | | PSPVPSTPPTPSPSTPPTPSPSASGNDDELHMQMTDLVYEALHFAKDEEIQKHVFQL |
| | | FEKATKAYKNKDROKLEKVVEELKELLERLLS |
| 55 | 1GS3 | DKENILQKIYEIMKTLDQLGHAEASMQVSDLIYEFMKQGDERLLEEAERLLEEVERG |
| | | GGGSGGGGSGGGGSGGGGSGGGGSGGGGSGGGGSGGGGSGGGGSGGGGSGGGGSGGG |
| | | GSGGGGSGGGGSGGGGSNDDELHMQMTDLVYEALHFAKDEEIQKHVFQLFEKATKAY |
| | | KNKDRQKLEKVVEELKELLERLLS |
| 56 | 3GS1 | NDDELHMQMTDLVYEALHFAKDEEIQKHVFQLFEKATKAYKNKDRQKLEKVVEELKE |
| | | LLERLLSGGGGSGGGGSGGGGSGGGGSGGGGSGGGGSGGGGSGGGGSGGGGSGGGGS |
| | | GGGGSGGGGSGGGGSGGGGSGGGGSDKENILQKIYEIMKTLDQLGHAEASMQVSDLI |
| | | YEFMKQGDERLLEEAERLLEEVER |
| 58 | 1PRO3 | DKENILQKIYEIMKTLDQLGHAEASMQVSDLIYEFMKQGDERLLEEAERLLEEVERA |
| | | GSGGSGGSGGSPVPSTPPTPSPSTPPTPSPSPVPSTPPTPSPSTPPTPSPSPVPSTP |
| | | PTPSPSTPPTPSPSASGNDDELHMQMTDLVYEALHFAKDEEIQKHVFQLFEKATKAY |
| | | KNKDRQKLEKVVEELKELLERLLS |
| 59 | 3PRO1 | NDDELHMQMTDLVYEALHFAKDEEIQKHVFQLFEKATKAYKNKDRQKLEKVVEELKE |
| | | LLERLLSAGSGGSGGSGGSPVPSTPPTPSPSTPPTPSPSPVPSTPPTPSPSTPPTPS |
| | | PSPVPSTPPTPSPSTPPTPSPSASGDKENILQKIYEIMKTLDQLGHAEASMQVSDLI |
| | | YEFMKQGDERLLEEAERLLEEVER |
| 454 | CSL- | DKEWILQKIYEIMRLLDELGHAEASMRVSDLIYEFMKKGDERLLEEAERLLEEVERG |
| | LCB1- | GGGSGGGGSGGGGSDKEWILQKIYEIMRLLDELGHAEASMRVSDLIYEFMKKGDERL |
| | GS15- | LEEAERLLEEVER |
| | LCB1 | |
| 455 | CSL- | NDDELHMLMTDLVYEALHFAKDEEIKKRVFQLFELADKAYKNNDRQKLEKVVEELKE |
| | LCB3- | LLERLLSGGGGSGGGGSGGGGSNDDELHMLMTDLVYEALHFAKDEEIKKRVFQLFEL |
| | GS15- | ADKAYKNNDRQKLEKVVEELKELLERLLS |
| | LCB3 | |
| 456 | CSL- | DKEWILQKIYEIMRLLDELGHAEASMRVSDLIYEFMKKGDERLLEEAERLLEEVERG |
| | LCB1- | GGGSGGGGSGGGGSGGGGSDKEWILQKIYEIMRLLDELGHAEASMRVSDLIYEFMKK |
| | GS20- | GDERLLEEAERLLEEVER |
| | LCB1 | |
| 457 | CSL- | NDDELHMLMTDLVYEALHFAKDEEIKKRVFQLFELADKAYKNNDRQKLEKVVEELKE |
| | LCB3- | LLERLLSGGGGSGGGGSGGGGSGGGGSNDDELHMLMTDLVYEALHFAKDEEIKKRVF |
| | GS20- | QLFELADKAYKNNDRQKLEKVVEELKELLERLLS |
| | LCB3 | |
| 458 | CSL- | DKEWILQKIYEIMRLLDELGHAEASMRVSDLIYEFMKKGDERLLEEAERLLEEVERG |
| | LCB1- | SSGSGSSGSGSSGSGSSGSDKEWILQKIYEIMRLLDELGHAEASMRVSDLIYEFMKK |
| | GS20- | GDERLLEEAERLLEEVERGSSSGGSSSGGSSSGGSSSGDKEWILQKIYEIMRLLDEL |
| | LCB1- | GHAEASMRVSDLIYEFMKKGDERLLEEAERLLEEVER |
| | GS20- | |
| | LCB1 | |
| 459 | CSL- | NDDELHMLMTDLVYEALHFAKDEEIKKRVFQLFELADKAYKNNDRQKLEKVVEELKE |
| | LCB3- | LLERLLSGSSGSGSSGSGSSGSGSSGSNDDELHMLMTDLVYEALHFAKDEEIKKRVF |
| | GS20- | QLFELADKAYKNNDRQKLEKVVEELKELLERLLSGSSSGGSSSGGSSSGGSSSGNDD |
| | LCB3- | ELHMLMTDLVYEALHFAKDEEIKKRVFQLFELADKAYKNNDRQKLEKVVEELKELLE |
| | GS20- | RLLS |
| | LCB3 | |
| 460 | CSL- | DKEWILQKIYEIMRLLDELGHAEASMRVSDLIYEFMKKGDERLLEEAERLLEEVERG |
| | LCB1- | SAGGSPAGSPTSTGTSTSGDKEWILQKIYEIMRLLDELGHAEASMRVSDLIYEFMKK |
| | XTENx2 | GDERLLEEAERLLEEVER |
| 461 | CSL- | DKEWILQKIYEIMRLLDELGHAEASMRVSDLIYEFMKKGDERLLEEAERLLEEVERG |
| | LCB1- | SAGGSPAGSPTSTGTSGSGDKEWILQKIYEIMRLLDELGHAEASMRVSDLIYEFMKK |
| | XTENx3 | GDERLLEEAERLLEEVERGSAGGSPAGSPTSTGTSGSGDKEWILQKIYEIMRLLDEL |
| | | GHAEASMRVSDLIYEFMKKGDERLLEEAERLLEEVER |
| 462 | CSL- | NDDELHMLMTDLVYEALHFAKDEEIKKRVFQLFELADKAYKNNDRQKLEKVVEELKE |
| | LCB3- | LLERLLSGSAGGSPAGSPTSTGTSGSGNDDELHMLMTDLVYEALHFAKDEEIKKRVF |
| | XTENx2 | QLFELADKAYKNNDRQKLEKVVEELKELLERLLS |
| 463 | CSL- | NDDELHMLMTDLVYEALHFAKDEEIKKRVFQLFELADKAYKNNDRQKLEKVVEELKE |
| | LCB3- | LLERLLSGSAGGSPAGSPTSTGTSGSGNDDELHMLMTDLVYEALHFAKDEEIKKRVF |
| | XTENx3 | QLFELADKAYKNNDRQKLEKVVEELKELLERLLSGSAGGSPAGSPTSTGTSGSGNDD |
| | | ELHMLMTDLVYEALHFAKDEEIKKRVFQLFELADKAYKNNDRQKLEKVVEELKELLE |
| | | RLLS |
| 458 | C- | DKEWILQKIYEIMRLLDELGHAEASMRVSDLIYEFMKKGDERLLEEAERLLEEVERG |
| | LCB1- | SSGSGSSGSGSSGSGSSGSDKEWILQKIYEIMRLLDELGHAEASMRVSDLIYEFMKK |
| | GS20- | GDERLLEEAERLLEEVERGSSSGGSSSGGSSSGGSSSGDKEWILQKIYEIMRLLDEL |
| | LCB1- | GHAEASMRVSDLIYEFMKKGDERLLEEAERLLEEVER |
| | GS20- | |
| | LCB1- | |
| | LS | |
| 459 | C- | NDDELHMLMTDLVYEALHFAKDEEIKKRVFQLFELADKAYKNNDRQKLEKVVEELKE |
| | LCB3- | LLERLLSGSSGSGSSGSGSSGSGSSGSNDDELHMLMTDLVYEALHFAKDEEIKKRVF |
| | GS20- | QLFELADKAYKNNDRQKLEKVVEELKELLERLLSGSSSGGSSSGGSSSGGSSSGNDD |
| | LCB3- | ELHMLMTDLVYEALHFAKDEEIKKRVFQLFELADKAYKNNDRQKLEKVVEELKELLE |
| | GS20- | RLLS |
| | LCB3- | |
| | LS | |
| 464 | CSL- | DKEWILQKIYEIMRLLDELGHAEASMRVSDLIYEFMKKGDERLLEEAERLLEEVERG |
| | LCB1- | GSSAGSPTSTGTSSATPSGSGTGGDKEWILQKIYEIMRLLDELGHAEASMRVSDLIY |
| | XTEN25 | EFMKKGDERLLEEAERLLEEVERGGSSAGSPTSTGTSSATPSGSGTGGDKEWILQKI |
| | x3 | YEIMRLLDELGHAEASMRVSDLIYEFMKKGDERLLEEAERLLEEVER |
| 465 | CSL- | NDDELHMLMTDLVYEALHFAKDEEIKKRVFQLFELADKAYKNNDRQKLEKVVEELKE |
| | LCB3- | LLERLLSGGSSAGSPTSTGTSSATPSGSGTGGNDDELHMLMTDLVYEALHFAKDEEI |
| | XTEN25 | KKRVFQLFELADKAYKNNDRQKLEKVVEELKELLERLLSGGSSAGSPTSTGTSSATP |
| | x3 | SGSGTGGNDDELHMLMTDLVYEALHFAKDEEIKKRVFQLFELADKAYKNNDRQKLEK |
| | | WEELKELLERLLS |
| 466 | LCB1_ | DKENILQKIYEIMKTLEQLGHAEASMQVSDLIYEFMKQGDERLLEEAERLLEEVERG |
| | v1.3_GS_ | GSSGGGSSGGGSSGGGSSGGGSSGDKENILQKIYEIMKTLEQLGHAEASMQVSDLIY |
| | 2X | EFMKQGDERLLEEAERLLEEVER |
| 467 | LCB1_ | DKENILQKIYEIMKTLEQLGHAEASMQVSDLIYEFMKQGDERLLEEAERLLEEVERG |
| | v1.3_XTEN_ | GSSAGSPTSTGTSSATPSGSGTGGDKENILQKIYEIMKTLEQLGHAEASMQVSDLIY |
| | 2X | EFMKQGDERLLEEAERLLEEVER |
| 468 | LCB1_v | DKENILQKIYEIMKTLEQLGHAEASMQVSDLIYEFMKQGDERLLEEAERLLEEVERG |
| | 1.3_EAAAK_ | GSSGEAAAKEAAAKEAAAKGSSGGDKENILQKIYEIMKTLEQLGHAEASMQVSDLIY |
| | 2X | EFMKQGDERLLEEAERLLEEVER |
| 469 | LCB1_ | DKENILQKIYEIMKTLEQLGHAEASMQVSDLIYEFMKQGDERLLEEAERLLEEVERG |
| | v1.3_Pro_ | GSSGPSTPPTPSPSTPPTPSPSPGGSSGDKENILQKIYEIMKTLEQLGHAEASMQVS |
| | 2X | DLIYEFMKQGDERLLEEAERLLEEVER |
| 470 | LCB1_v | DKENILQKIYEIMKTLEQLGHAEASMQVSDLIYEFMKQGDERLLEEAERLLEEVERG |
| | 1.3_Ub_2x | GSSGQIFVKTLTGKTITLEVEPSDTIENVKAKIQDKEGIPPDQQRLIFAGKQLEDGR |
| | | TLSDYNIQKESTLHLVLRLRGGGGSSGDKENILQKIYEIMKTLEQLGHAEASMQVSD |
| | | LIYEFMKQGDERLLEEAERLLEEVER |
| 471 | LCB1_ | DKENILQKIYEIMKTLEQLGHAEASMQVSDLIYEFMKQGDERLLEEAERLLEEVERG |
| | v1.3_XTEN_ | GSSAGSPTSTGTSSATPSGSGTGGDKENILQKIYEIMKTLEQLGHAEASMQVSDLIY |
| | 3X | EFMKQGDERLLEEAERLLEEVERGGSSAGSPTSTGTSSATPSGSGTGGDKENILQKI |
| | | YEIMKTLEQLGHAEASMQVSDLIYEFMKQGDERLLEEAERLLEEVER |
| 472 | LCB1_ | DKENILQKIYEIMKTLEQLGHAEASMQVSDLIYEFMKQGDERLLEEAERLLEEVERG |
| | v1.3_EAAK_ | GSSGEAAAKEAAAKEAAAKGSSGGDKENILQKIYEIMKTLEQLGHAEASMQVSDLIY |
| | 3X | EFMKQGDERLLEEAERLLEEVERGGSSGEAAAKEAAAKEAAAKGSSGGDKENILQKI |
| | | YEIMKTLEQLGHAEASMQVSDLIYEFMKQGDERLLEEAERLLEEVER |
| 473 | LCB1_ | DKENILQKIYEIMKTLEQLGHAEASMQVSDLIYEFMKQGDERLLEEAERLLEEVERG |
| | v1.3_Pro_ | GSSGPSTPPTPSPSTPPTPSPSPGGSSGDKENILQKIYEIMKTLEQLGHAEASMQVS |
| | 3X | DLIYEFMKQGDERLLEEAERLLEEVERGGSSGPSTPPTPSPSTPPTPSPSPGGSSGD |
| | | KENILQKIYEIMKTLEQLGHAEASMQVSDLIYEFMKQGDERLLEEAERLLEEVER |
| 474 | LCB1_ | DKENILQKIYEIMKTLEQLGHAEASMQVSDLIYEFMKQGDERLLEEAERLLEEVERG |
| | v1.3_Ub_ | GSSGQIFVKTLTGKTITLEVEPSDTIENVKAKIQDKEGIPPDQQRLIFAGKQLEDGR |
| | 3X | TLSDYNIQKESTLHLVLRLRGGGGSSGDKENILQKIYEIMKTLEQLGHAEASMQVSD |
| | | LIYEFMKQGDERLLEEAERLLEEVERGGSSGQIFVKTLTGKTITLEVEPSDTIENVK |
| | | AKIQDKEGIPPDQQRLIFAGKQLEDGRTLSDYNIQKESTLHLVLRLRGGGGSSGDKE |
| | | NILQKIYEIMKTLEQLGHAEASMQVSDLIYEFMKQGDERLLEEAERLLEEVER |
| 475 | 1GS1_ | DKENVLQKIYEIMKELERLGHAEASMQVSDLIYEFMKTKDENLLEEAERLLEEVKRG |
| | NTS | GSSGGGSSGGGSSGGGSSGGGSSGDKENVLQKIYEIMKELERLGHAEASMQVSDLIY |
| | | EFMKTKDENLLEEAERLLEEVKR |
| 476 | 1PRP1_ | DKENVLQKIYEIMKELERLGHAEASMQVSDLIYEFMKTKDENLLEEAERLLEEVKRG |
| | NTS | GSSGPSTPPTPSPSTPPTPSPSPGGSSGDKENVLQKIYEIMKELERLGHAEASMQVS |
| | | DLIYEFMKTKDENLLEEAERLLEEVKR |
| 477 | 3GS3_ | NLDELHMQMTDLVYEALHFAKDEEFQKHVFQLFEKATKAYKNKDRQKLEKVVEELKE |
| | NTS | LLERLLSGGSSGGGSSGGGSSGGGSSGGGSSGNLDELHMQMTDLVYEALHFAKDEEF |
| | | QKHVFQLFEKATKAYKNKDRQKLEKWEELKELLERLLS |
| 478 | 3Pro3_ | NLDELHMQMTDLVYEALHFAKDEEFQKHVFQLFEKATKAYKNKDRQKLEKVVEELKE |
| | NTS | LLERLLSGGSSGPSTPPTPSPSTPPTPSPSPGGSSGNLDELHMQMTDLVYEALHFAK |
| | | DEEFQKHVFQLFEKATKAYKNKDRQKLEKWEELKELLERLLS |
| 475 | 1GS1_ | DKENVLQKIYEIMKELERLGHAEASMQVSDLIYEFMKTKDENLLEEAERLLEEVKRG |
| | CTS | GSSGGGSSGGGSSGGGSSGGGSSGDKENVLQKIYEIMKELERLGHAEASMQVSDLIY |
| | | EFMKTKDENLLEEAERLLEEVKR |
| 476 | 1Pro_ | DKENVLQKIYEIMKELERLGHAEASMQVSDLIYEFMKTKDENLLEEAERLLEEVKRG |
| | CTS | GSSGPSTPPTPSPSTPPTPSPSPGGSSGDKENVLQKIYEIMKELERLGHAEASMQVS |
| | | DLIYEFMKTKDENLLEEAERLLEEVKR |
| 477 | 3GS3_ | NLDELHMQMTDLVYEALHFAKDEEFQKHVFQLFEKATKAYKNKDRQKLEKVVEELKE |
| | CTS | LLERLLSGGSSGGGSSGGGSSGGGSSGGGSSGNLDELHMQMTDLVYEALHFAKDEEF |
| | | QKHVFQLFEKATKAYKNKDRQKLEKWEELKELLERLLS |
| 478 | 3Pro3_ | NLDELHMQMTDLVYEALHFAKDEEFQKHVFQLFEKATKAYKNKDRQKLEKVVEELKE |
| | CTS | LLERLLSGGSSGPSTPPTPSPSTPPTPSPSPGGSSGNLDELHMQMTDLVYEALHFAK |
| | | DEEFQKHVFQLFEKATKAYKNKDRQKLEKWEELKELLERLLS |
| 479 | 1GS1GS1_ | DKENVLQKIYEIMKELERLGHAEASMQVSDLIYEFMKTKDENLLEEAERLLEEVKRG |
| | NTS | GSSGGGSSGGGSSGGGSSGGGSSGDKENVLQKIYEIMKELERLGHAEASMQVSDLIY |
| | | EFMKTKDENLLEEAERLLEEVKRGGSSGGGSSGGGSSGGGSSGGGSSGDKENVLQKI |
| | | YEIMKELERLGHAEASMQVSDLIYEFMKTKDENLLEEAERLLEEVKR |
| 480 | 1Pro1Pro1_ | DKENVLQKIYEIMKELERLGHAEASMQVSDLIYEFMKTKDENLLEEAERLLEEVKRG |
| | NTS | GSSGPSTPPTPSPSTPPTPSPSPGGSSGDKENVLQKIYEIMKELERLGHAEASMQVS |
| | | DLIYEFMKTKDENLLEEAERLLEEVKRGGSSGPSTPPTPSPSTPPTPSPSPGGSSGD |
| | | KENVLQKIYEIMKELERLGHAEASMQVSDLIYEFMKTKDENLLEEAERLLEEVKR |
| 481 | 3GS3GS3_ | NLDELHMQMTDLVYEALHFAKDEEFQKHVFQLFEKATKAYKNKDRQKLEKVVEELKE |
| | NTS | LLERLLSGGSSGGGSSGGGSSGGGSSGGGSSGNLDELHMQMTDLVYEALHFAKDEEF |
| | | QKHVFQLFEKATKAYKNKDRQKLEKVVEELKELLERLLSGGSSGGGSSGGGSSGGGS |
| | | SGGGSSGNLDELHMQMTDLVYEALHFAKDEEFQKHVFQLFEKATKAYKNKDRQKLEK |
| | | WEELKELLERLLS |
| 482 | 3Pro3Pro3_ | NLDELHMQMTDLVYEALHFAKDEEFQKHVFQLFEKATKAYKNKDRQKLEKVVEELKE |
| | NTS | LLERLLSGGSSGPSTPPTPSPSTPPTPSPSPGGSSGNLDELHMQMTDLVYEALHFAK |
| | | DEEFQKHVFQLFEKATKAYKNKDRQKLEKVVEELKELLERLLSGGSSGPSTPPTPSP |
| | | STPPTPSPSPGGSSGNLDELHMQMTDLVYEALHFAKDEEFQKHVFQLFEKATKAYKN |
| | | KDRQKLEKWEELKELLERLLS |
| 479 | 1GS1GS1_ | DKENVLQKIYEIMKELERLGHAEASMQVSDLIYEFMKTKDENLLEEAERLLEEVKRG |
| | CTS | GSSGGGSSGGGSSGGGSSGGGSSGDKENVLQKIYEIMKELERLGHAEASMQVSDLIY |
| | | EFMKTKDENLLEEAERLLEEVKRGGSSGGGSSGGGSSGGGSSGGGSSGDKENVLQKI |
| | | YEIMKELERLGHAEASMQVSDLIYEFMKTKDENLLEEAERLLEEVKR |
| 480 | 1Pro1pRO_ | DKENVLQKIYEIMKELERLGHAEASMQVSDLIYEFMKTKDENLLEEAERLLEEVKRG |
| | CTS | GSSGPSTPPTPSPSTPPTPSPSPGGSSGDKENVLQKIYEIMKELERLGHAEASMQVS |
| | | DLIYEFMKTKDENLLEEAERLLEEVKRGGSSGPSTPPTPSPSTPPTPSPSPGGSSGD |
| | | KENVLQKIYEIMKELERLGHAEASMQVSDLIYEFMKTKDENLLEEAERLLEEVKR |
| 481 | 3GS3GS3_ | NLDELHMQMTDLVYEALHFAKDEEFQKHVFQLFEKATKAYKNKDRQKLEKVVEELKE |
| | CTS | LLERLLSGGSSGGGSSGGGSSGGGSSGGGSSGNLDELHMQMTDLVYEALHFAKDEEF |
| | | QKHVFQLFEKATKAYKNKDRQKLEKVVEELKELLERLLSGGSSGGGSSGGGSSGGGS |
| | | SGGGSSGNLDELHMQMTDLVYEALHFAKDEEFQKHVFQLFEKATKAYKNKDRQKLEK |
| | | WEELKELLERLLS |
| 482 | 3Pro3pRO3_ | NLDELHMQMTDLVYEALHFAKDEEFQKHVFQLFEKATKAYKNKDRQKLEKVVEELKE |
| | CTS | LLERLLSGGSSGPSTPPTPSPSTPPTPSPSPGGSSGNLDELHMQMTDLVYEALHFAK |
| | | DEEFQKHVFQLFEKATKAYKNKDRQKLEKVVEELKELLERLLSGGSSGPSTPPTPSP |
| | | STPPTPSPSPGGSSGNLDELHMQMTDLVYEALHFAKDEEFQKHVFQLFEKATKAYKN |
| | | KDRQKLEKWEELKELLERLLS |
| 483 | 1GS3_ | DKENVLQKIYEIMKELERLGHAEASMQVSDLIYEFMKTKDENLLEEAERLLEEVKRG |
| | NTS | GSSGGGSSGGGSSGGGSSGGGSSGNLDELHMQMTDLVYEALHFAKDEEFQKHVFQLF |
| | | EKATKAYKNKDRQKLEKWEELKELLERLLS |
| 484 | 1Pro3_ | DKENVLQKIYEIMKELERLGHAEASMQVSDLIYEFMKTKDENLLEEAERLLEEVKRG |
| | NTS | GSSGPSTPPTPSPSTPPTPSPSPGGSSGNLDELHMQMTDLVYEALHFAKDEEFQKHV |
| | | FQLFEKATKAYKNKDRQKLEKWEELKELLERLLS |
| 485 | 3GS1_ | NLDELHMQMTDLVYEALHFAKDEEFQKHVFQLFEKATKAYKNKDRQKLEKVVEELKE |
| | NTS | LLERLLSGGSSGGGSSGGGSSGGGSSGGGSSGDKENVLQKIYEIMKELERLGHAEAS |
| | | MQVSDLIYEFMKTKDENLLEEAERLLEEVKR |
| 486 | 3Pro1_ | NLDELHMQMTDLVYEALHFAKDEEFQKHVFQLFEKATKAYKNKDRQKLEKVVEELKE |
| | NTS | LLERLLSGGSSGPSTPPTPSPSTPPTPSPSPGGSSGDKENVLQKIYEIMKELERLGH |
| | | AEASMQVSDLIYEFMKTKDENLLEEAERLLEEVKR |
| 483 | 1GS3_ | DKENVLQKIYEIMKELERLGHAEASMQVSDLIYEFMKTKDENLLEEAERLLEEVKRG |
| | CTS | GSSGGGSSGGGSSGGGSSGGGSSGNLDELHMQMTDLVYEALHFAKDEEFQKHVFQLF |
| | | EKATKAYKNKDRQKLEKWEELKELLERLLS |
| 484 | 1Pro3_ | DKENVLQKIYEIMKELERLGHAEASMQVSDLIYEFMKTKDENLLEEAERLLEEVKRG |
| | CTS | GSSGPSTPPTPSPSTPPTPSPSPGGSSGNLDELHMQMTDLVYEALHFAKDEEFQKHV |
| | | PQLFEKATKAYKNKDRQKLEKWEELKELLERLLS |
| 485 | 3GS1_ | NLDELHMQMTDLVYEALHFAKDEEFQKHVFQLFEKATKAYKNKDRQKLEKVVEELKE |
| | CTS | LLERLLSGGSSGGGSSGGGSSGGGSSGGGSSGDKENVLQKIYEIMKELERLGHAEAS |
| | | MQVSDLIYEFMKTKDENLLEEAERLLEEVKR |
| 486 | 3Pro1_ | NLDELHMQMTDLVYEALHFAKDEEFQKHVFQLFEKATKAYKNKDRQKLEKVVEELKE |
| | CTS | LLERLLSGGSSGPSTPPTPSPSTPPTPSPSPGGSSGDKENVLQKIYEIMKELERLGH |
| | | AEASMQVSDLIYEFMKTKDENLLEEAERLLEEVKR |
| 487 | 3- | NLDELHMQMTDLVYEALHFAKDEEFQKHVFQLFEKATKAYKNKDRQKLEKVVEELKE |
| | GS10- | LLERLLSGGGSGGGSGGDKENVLQKIYEIMKELERLGHAEASMQVSDLIYEFMKTKD |
| | 1- | ENLLEEAERLLEEVKR |
| | L_NTS | |
| 488 | 3- | NLDELHMQMTDLVYEALHFAKDEEFQKHVFQLFEKATKAYKNKDRQKLEKVVEELKE |
| | GS10- | LLERLLSGGSSGGGSSGDKENVLQKIYEIMKELERLGHAEASMQVSDLIYEFMKTKD |
| | 1_ | ENLLEEAERLLEEVKR |
| | NTS | |
| 489 | 3- | NLDELHMQMTDLVYEALHFAKDEEFQKHVFQLFEKATKAYKNKDRQKLEKVVEELKE |
| | GS15- | LLERLLSGGSSGGGSSGGGSSGDKENVLQKIYEIMKELERLGHAEASMQVSDLIYEF |
| | 1_NTS | MKTKDENLLEEAERLLEEVKR |
| 490 | 3- | NLDELHMQMTDLVYEALHFAKDEEFQKHVFQLFEKATKAYKNKDRQKLEKVVEELKE |
| | GS20- | LLERLLSGGSSGGGSSGGGSSGGGSSGDKENVLQKIYEIMKELERLGHAEASMQVSD |
| | 1_NTS | LIYEFMKTKDENLLEEAERLLEEVKR |
| 491 | 1- | DKENVLQKIYEIMKELERLGHAEASMQVSDLIYEFMKTKDENLLEEAERLLEEVKRG |
| | GS10- | GSSGGGSSGDKENVLQKIYEIMKELERLGHAEASMQVSDLIYEFMKTKDENLLEEAE |
| | 1_NTS | RLLEEVKR |
| 492 | 1- | DKENVLQKIYEIMKELERLGHAEASMQVSDLIYEFMKTKDENLLEEAERLLEEVKRG |
| | GS15- | GSSGGGSSGGGSSGDKENVLQKIYEIMKELERLGHAEASMQVSDLIYEFMKTKDENL |
| | 1_NTS | LEEAERLLEEVKR |
| 493 | 1- | DKENVLQKIYEIMKELERLGHAEASMQVSDLIYEFMKTKDENLLEEAERLLEEVKRG |
| | GS20- | GSSGGGSSGGGSSGGGSSGDKENVLQKIYEIMKELERLGHAEASMQVSDLIYEFMKT |
| | 1_NTS | KDENLLEEAERLLEEVKR |
| 494 | 2- | ELEEQVMHVLDQVSELAHELLHKLTGEELERAAYFNWWATEMMLELIKSDDEREIRE |
| | 1_GS10 | IEEEARRILEHLEELARKGGSSGGGSSGDKENVLQKIYEIMKELERLGHAEASMQVS |
| | | DLIYEFMKTKDERLLEEAERLLEEVKR |
| 495 | 2- | ELEEQVMHVLDQVSELAHELLHKLTGEELERAAYFNWWATEMMLELIKSDDEREIRE |
| | 1_GS15 | IEEEARRILEHLEELARKGGSSGGGSSGGGSSGDKENVLQKIYEIMKELERLGHAEA |
| | | SMQVSDLIYEFMKTKDERLLEEAERLLEEVKR |
| 496 | 2- | ELEEQVMHVLDQVSELAHBLLHKLTGEELERAAYFNWWATEMMLELIKSDDEREIRE |
| | 1_GS20 | IEEEARRILEHLEELARKGGSSGGGSSGGGSSGGGSSGDKENVLQKIYEIMKELERL |
| | | GHAEASMQVSDLIYEFMKTKDERLLEEAERLLEEVKR |
| 497 | 2-2- | ELEEQVMHVLDQVSELAHELLHKLTGEELERAAYFNWWATEMMLELIKSDDEREIRE |
| | 1_GS10 | IEEEARRILEHLEELARKGGSSGGGSSGELEEQVMHVLDQVSELAHELLHKLTGEEL |
| | | ERAAYFNWWATEMMLELIKSDDEREIREIEEEARRILEHLEELARKGGSSGGGSSGD |
| | | KENVLQKIYEIMKELERLGHAEASMQVSDLIYEFMKTKDERLLEEAERLLEEVKR |
| 498 | 2-2- | ELEEQVMHVLDQVSELAHELLHKLTGEELERAAYFNWWATEMMLELIKSDDEREIRE |
| | 1_GS15 | IEEEARRILEHLEELARKGGSSGGGSSGGGSSGELEEQVMHVLDQVSELAHELLHKL |
| | | TGEELERAAYFNWWATEMMLELIKSDDEREIREIEEEARRILEHLEELARKGGSSGG |
| | | GSSGGGSSGDKENVLQKIYEIMKELERLGHAEASMQVSDLIYEFMKTKDERLLEEAE |
| | | RLLEEVKR |
| 499 | 2-2- | ELEEQVMHVLDQVSELAHELLHKLTGEELERAAYFNWWATEMMLELIKSDDEREIRE |
| | 1_GS20 | IEEEARRILEHLEELARKGGSSGGGSSGGGSSGGGSSGELEEQVMHVLDQVSELAHE |
| | | LLHKLTGEELERAAYFNWWATEMMLELIKSDDEREIREIEEEARRILEHLEELARKG |
| | | GSSGGGSSGGGSSGGGSSGDKENVLQKIYEIMKELERLGHAEASMQVSDLIYEFMKT |
| | | KDERLLEEAERLLEEVKR |
| 500 | 2- | ELEEQVMHVLDQVSELAHBLLHKLTGEELERAAYFNWWATEMMLELIKSDDEREIRE |
| | 2_GS10 | IEEEARRILEHLEELARKGGSSGGGSSGELEEQVMHVLDQVSELAHELLHKLTGEEL |
| | | ERAAYFNWWATEMMLELIKSDDEREIREIEEEARRILEHLEELARK |
| 501 | 2- | ELEEQVMHVLDQVSELAHELLHKLTGEELERAAYFNWWATEMMLELIKSDDEREIRE |
| | 2_GS15 | IEEEARRILEHLEELARKGGSSGGGSSGGGSSGELEEQVMHVLDQVSELAHELLHKL |
| | | TGEELERAAYFNWWATEMMLELIKSDDEREIREIEEEARRILEHLEELARK |
| 502 | 2- | ELEEQVMHVLDQVSELAHELLHKLTGEELERAAYFNWWATEMMLELIKSDDEREIRE |
| | 2_GS20 | IEEEARRILEHLEELARKGGSSGGGSSGGGSSGGGSSGELEEQVMHVLDQVSELAHE |
| | | LLHKLTGEELERAAYFNWWATEMMLELIKSDDEREIREIEEEARRILEHLEELARK |
| 503 | 2-2- | ELEEQVMHVLDQVSELAHELLHKLTGEELERAAYFNVWATEMMLELIKSDDEREIRE |
| | 2_GS10 | IEEEARRILEHLEELARKGGSSGGGSSGELEEQVMHVLDQVSELAHELLHKLTGEEL |
| | | ERAAYFNWWATEMMLELIKSDDEREIREIEEEARRILEHLEELARKGGSSGGGSSGE |
| | | LEEQVMHVLDQVSELAHELLHKLTGEELERAAYFNWWATEMMLELIKSDDEREIREI |
| | | EEEARRILEHLEELARK |
| 504 | 2-2- | ELEEQVMHVLDQVSELAHELLHKLTGEELERAAYFNWWATEMMLELIKSDDEREIRE |
| | 2_GS15 | IEEEARRILEHLEELARKGGSSGGGSSGGGSSGELEEQVMHVLDQVSELAHELLHKL |
| | | TGEELERAAYFNVMATEMMLELIKSDDEREIREIEEEARRILEHLEELARKGGSSGG |
| | | GSSGGGSSGELEEQVMHVLDQVSELAHELLHKLTGEELERAAYFNWWATEMMLELIK |
| | | SDDEREIREIEEEARRILEHLEELARK |
| 505 | 2-2- | ELEEQVMHVLDQVSELAHELLHKLTGEELERAAYFNWWATEMMLELIKSDDEREIRE |
| | 2_GS20 | IEEEARRILEHLEELARKGGSSGGGSSGGGSSGGGSSGELEEQVMHVLDQVSELAHE |
| | | LLHKLTGEELERAAYFNWWATEMMLELIKSDDEREIREIEEEARRILEHLEELARKG |
| | | GSSGGGSSGGGSSGGGSSGELEEQVMHVLDQVSELAHELLHKLTGEELERAAYFNWW |
| | | ATEMMLELIKSDDEREIREIEEEARRILEHLEELARK |
| 506 | AHB2- | ELEEQVMHVLDQVSELAHELLHKLTGEELERAAYFNWWATEMMLELIKSDDEREIRE |
| | AHB2- | IEEEARRILEHLEELARKGGASPAAPAPASPAAPAPSAPAGGELEEQVMHVLDQVSE |
| | PAS | LAHELLHKLTGEELERAAYFNWWATEMMLELIKSDDEREIREIEEEARRILEHLEEL |
| | | ARK |
| 507 | LCB3- | NLDELHMQMTDLVYEALHFAKDEEFQKHVFQLFEKATKAYKNKDRQKLEKVVEELKE |
| | LCB1_ | LLERLLSGGASPAAPAPASPAAPAPSAPAGGDKENVLQKIYEIMKELERLGHAEASM |
| | PAS | QVSDLIYEFMKTKDERLLEEAERLLEEVKR |
| 508 | AHB2- | ELEEQVMHVLDQVSELAHELLHKLTGEELERAAYFNWWATEMMLELIKSDDEREIRE |
| | LCB1_ | IEEEARRILEHLEELARKGGASPAAPAPASPAAPAPSAPAGGDKENVLQKIYEIMKE |
| | PAS | LERLGHAEASMQVSDLIYEFMKTKDERLLEEAERLLEEVKR |
| 509 | AHB2_ | ELEEQVMHVLDQVSELAHELLHKLTGEELERAAYFNWWATEMMLELIKSDDEREIRE |
| | 3x_PAS | IEEEARRILEHLEELARKGGASPAAPAPASPAAPAPSAPAGGELEEQVMHVLDQVSE |
| | | LAHELLHKLTGEELERAAYFNWWATEMMLELIKSDDEREIREIEEEARRILEHLEEL |
| | | ARKGGASPAAPAPASPAAPAPSAPAGGELEEQVMHVLDQVSELAHELLHKLTGEELE |
| | | RAAYFNWWATEMMLELIKSDDEREIREIEEEARRILEHLEELARK |
| 510 | 3-2- | NLDELHMQMTDLVYEALHFAKDEEFQKHVFQLFEKATKAYKNKDRQKLEKVVEELKE |
| | 1_PAS | LLERLLSGGASPAAPAPASPAAPAPSAPAGGELEEQVMHVLDQVSELAHELLHKLTG |
| | | EELERAAYFNWWATEMMLELIKSDDEREIREIEEEARRILEHLEELARKGGASPAAP |
| | | APASPAAPAPSAPAGGDKENVLQKIYEIMKELERLGHAEASMQVSDLIYEFMKTKDE |
| | | RLLEEAERLLEEVKR |
| 511 | 2-3- | ELEEQVMHVLDQVSELAHELLHKLTGEELERAAYFNWWATEMMLELIKSDDEREIRE |
| | 1_PAS | IEEEARRILEHLEELARKGGASPAAPAPASPAAPAPSAPAGGNLDELHMQMTDLVYE |
| | | ALHFAKDEEFQKHVFQLFEKATKAYKNKDRQKLEKVVEELKELLERLLSGGASPAAP |
| | | APASPAAPAPSAPAGGDKENVLQKIYEIMKELERLGHAEASMQVSDLIYEFMKTKDE |
| | | RLLEEAERLLEEVKR |
| 512 | 1-1- | DKENVLQKIYEIMKELERLGHAEASMQVSDLIYEFMKTKDENLLEEAERLLEEVKRG |
| | 1_PAS24 | GASPAAPAPASPAAPAPSAPAGGDKENVLQKIYEIMKELERLGHAEASMQVSDLIYE |
| | | FMKTKDENLLEEAERLLEEVKRGGASPAAPAPASPAAPAPSAPAGGDKENVLQKIYE |
| | | IMKELERLGHAEASMQVSDLIYEFMKTKDENLLEEAERLLEEVKR |
| 509 | 2-2- | ELEEQVMHVLDQVSELAHELLHKLTGEELERAAYFNWWATEMMLELIKSDDEREIRE |
| | 2_PAS24 | IEEEARRILEHLEELARKGGASPAAPAPASPAAPAPSAPAGGELEEQVMHVLDQVSE |
| | | LAHELLHKLTGEELERAAYFNWWATEMMLELIKSDDEREIREIEEEARRILEHLEEL |
| | | ARKGGASPAAPAPASPAAPAPSAPAGGELEEQVMHVLDQVSELAHELLHKLTGEELE |
| | | RAAYFNWWATEMMLELIKSDDEREIREIEEEARRILEHLEELARK |
| 513 | 3-3- | NLDELHMQMTDLVYEALHFAKDEEFQKHVFQLFEKATKAYKNKDRQKLEKVVEELKE |
| | 3_PAS24 | LLERLLSGGASPAAPAPASPAAPAPSAPAGGNLDELHMQMTDLVYEALHFAKDEEFQ |
| | | KHVFQLFEKATKAYKNKDRQKLEKVVEELKELLERLLSGGASPAAPAPASPAAPAPS |
| | | APAGGNLDELHMQMTDLVYEALHFAKDEEFQKHVFQLFEKATKAYKNKDRQKLEKVV |
| | | EELKELLERLLS |
| 514 | 2-2- | ELEEQVMHVLDQVSELAHELLHKLTGEELERAAYFNWWATEMMLELIKSDDEREIRE |
| | 1_PAS24 | IEEEARRILEHLEELARKGGASPAAPAPASPAAPAPSAPAGGELEEQVMHVLDQVSE |
| | | LAHELLHKLTGEELERAAYFNWWATEMMLELIKSDDEREIREIEEEARRILEHLEEL |
| | | ARKGGASPAAPAPASPAAPAPSAPAGGDKENVLQKIYEIMKELERLGHAEASMQVSD |
| | | LIYEFMKTKDENLLEEAERLLEEVKR |
| 515 | 2- | ELEEQVMHVLDQVSELAHELLHKLTGEELERAAYFNWWATEMMLELIKSDDEREIRE |
| | 2_PAS16 | IEEEARRILEHLEELARKGGASPAAPAPASPAGGELEEQVMHVLDQVSELAHELLHK |
| | | LTGEELERAAYFNWWATEMMLELIKSDDEREIREIEEEARRILEHLEELARK |
| 516 | 2- | ELEEQVMHVLDQVSELAHELLHKLTGEELERAAYFNWWATEMMLELIKSDDEREIRE |
| | 2_PAS11 | IEEEARRILEHLEELARKGGASPAAPAGGELEEQVMHVLDQVSELAHELLHKLTGEE |
| | | LERAAYFNWWATEMMLELIKSDDEREIREIEEEARRILEHLEELARK |
| 517 | 3- | NLDELHMQMTDLVYEALHFAKDEEFQKHVFQLFEKATKAYKNKDRQKLEKVVEELKE |
| | 1_PAS16 | LLERLLSGGASPAAPAPASPAGGDKENVLQKIYEIMKELERLGHAEASMQVSDLIYE |
| | | FMKTKDERLLEEAERLLEEVKR |
| 518 | 3- | NLDELHMQMTDLVYEALHFAKDEEFQKHVFQLFEKATKAYKNKDRQKLEKVVEELKE |
| | 1_PAS11 | LLERLLSGGASPAAPAGGDKENVLQKIYEIMKELERLGHAEASMQVSDLIYEFMKTK |
| | | DERLLEEAERLLEEVKR |
| 519 | 2- | ELEEQVMHVLDQVSELAHELLHKLTGEELERAAYFNWWATEMMLELIKSDDEREIRE |
| | 1_PAS16 | IEEEARRILEHLEELARKGGASPAAPAPASPAGGDKENVLOKIYEIMKELERLGHAE |
| | | ASMQVSDLIYEFMKTKDERLLEEAERLLEEVKR |
| 520 | 2- | ELEEQVMHVLDQVSELAHELLHKLTGEELERAAYFNWWATEMMLELIKSDDEREIRE |
| | 1_PAS11 | IEEEARRILEHLEELARKGGASPAAPAGGDKENVLQKIYEIMKELERLGHAEASMQV |
| | | SDLIYEFMKTKDERLLEEAERLLEEVKR |
| 521 | 3v2.3- | NIDELLMQVTDLIYEALHFAKDEEFQKHAFQLFEKATKAYKNKDKQKLEKVVEELKE |
| | 2- | LLERILSGGASPAAPAPASPAAPAPSAPAGGELEEQVMHVLDQVSELAHELLHKLTG |
| | 1_PAS24 | EELERAAYFNWWATEMMLELIKSDDEREIREIEEEARRILEHLEELARKGGASPAAP |
| | | APASPAAPAPSAPAGGDKENVLQKIYEIMKELERLGHAEASMQVSDLIYEFMKTKDE |
| | | RLLEEAERLLEEVKR |
| 522 | 2- | ELEEQVMHVLDQVSELAHELLHKLTGEELERAAYFNWWATEMMLELIKSDDEREIRE |
| | 3v2.3- | IEEEARRILEHLEELARKGGASPAAPAPASPAAPAPSAPAGGNIDELLMQVTDLIYE |
| | 1_PAS24 | ALHFAKDEEFQKHAFQLFEKATKAYKNKDKQKLEKVVEELKELLERILSGGASPAAP |
| | | APASPAAPAPSAPAGGDKENVLQKIYEIMKELERLGHAEASMQVSDLIYEFMKTKDE |
| | | RLLEEAERLLEEVKR |
| 523 | 2-2- | ELEEQVMHVLDQVSELAHELLHKLTGEELERAAYFNWWATEMMLELIKSDDEREIRE |
| | 2_PAS24_ | IEEEAARILEHLEELARTGGASPAAPAPASPAAPAPSAPAGGELEEQVMHVLDQVSE |
| | ompT | LAHELLHKLTGEELERAAYFNWWATEMMLELIKSDDEREIREIEEEAARILEHLEEL |
| | | ARTGGASPAAPAPASPAAPAPSAPAGGELEEQVMHVLDQVSELAHELLHKLTGEELE |
| | | RAAYFNWWATEMMLELIKSDDEREIREIEEEAARILEHLEELART |
| 524 | 1-1- | DKENVLQKIYEIMKELERLGHAEASMQVSDLIYEFMKTKDENLLEEAERLLEEVTRG |
| | 1_PAS24_ | GASPAAPAPASPAAPAPSAPAGGDKENVLOKIYEIMKELERLGHAEASMQVSDLIYE |
| | ompT | FMKTKDENLLEEAERLLEEVTRGGASPAAPAPASPAAPAPSAPAGGDKENVLQKIYE |
| | | IMKELERLGHAEASMQVSDLIYEFMKTKDENLLEEAERLLEEVTR |
| 525 | 3v2.3- | NIDELLMQVTDLIYEALHFAKDEEFQKHAFQLFEKATKAYKNKDKQKLEKVVEELKE |
| | 2- | LLERILSGGASPAAPAPASPAAPAPSAPAGGELEEQVMHVLDQVSELAHELLHKLTG |
| | 1_PAS24_ | EELERAAYFNWWATEMMLELIKSDDEREIREIEEEAARILEHLEELARTGGASPAAP |
| | ompT | APASPAAPAPSAPAGGDKENVLQKIYEIMKELERLGHAEASMQVSDLIYEFMKTKDE |
| | | RLLEEAERLLEEVKR |
| 526 | 2- | ELEEQVMHVLDQVSELAHELLHKLTGEELERAAYFNWWATEMMLELIKSDDEREIRE |
| | 3v2.3- | IEEEAARILEHLEELARTGGASPAAPAPASPAAPAPSAPAGGNIDELLMQVTDLIYE |
| | 1_PAS24_ | ALHFAKDEEFQKHAFOLFEKATKAYKNKDKQKLEKVVEELKELLERILSGGASPAAP |
| | ompT | APASPAAPAPSAPAGGDKENVLQKIYEIMKELERLGHAEASMQVSDLIYEFMKTKDE |
| | | RLLEEAERLLEEVKR |
| 527 | 3v2.3- | NIDELLMQVTDLIYEALHFAKDEEFQKHAFQLFEKATKAYKNKDKQKLEKVVEELKE |
| | 2- | LLERILSGGASPAAPAPASPAAPAPSAPAGGELEEQVMHVLDQVSELAHELLHKLTG |
| | 1_PAS24 | EELERAAYFNWWATEMMLELIKSDDEREIREIEEEARRILEHLEELARKGGASPAAP |
| | | APASPAAPAPSAPAGGDKENVLQKIYEIMKELERLGHAEASMQVSDLIYEFMKTKDE |
| | | NLLEEAERLLEEVKR |
| 528 | 2- | ELEEQVMHVLDQVSELAHELLHKLTGEELERAAYFNWWATEMMLELIKSDDEREIRE |
| | 3v2.3- | IEEEARRILEHLEELARKGGASPAAPAPASPAAPAPSAPAGGNIDELLMQVTDLIYE |
| | 1_PAS24 | ALHFAKDEEFQKHAFQLFEKATKAYKNKDKQKLEKVVEELKELLERILSGGASPAAP |
| | | APASPAAPAPSAPAGGDKENVLQKIYEIMKELERLGHAEASMQVSDLIYEFMKTKDE |
| | | NLLEEAERLLEEVKR |
| 529 | 2- | NIDELLMQVTDLIYEALHFAKDEEFQKHAFQLFEKATKAYKNKDKQKLEKVVEELKE |
| | 3v2.3- | LLERILSGGASPAAPAPASPAAPAPSAPAGGELEEQVMHVLDQVSELAHELLHKLTG |
| | 1_PAS24_ | EELERAAYFNWWATEMMLELIKSDDEREIREIEEEAARILEHLEELARTGGASPAAP |
| | ompT | APASPAAPAPSAPAGGDKENVLQKIYEIMKELERLGHAEASMQVSDLIYEFMKTKDE |
| | | NLLEEAERLLEEVKR |
| 530 | 2- | ELEEQVMHVLDQVSELAHELLHKLTGEELERAAYFNWWATEMMLELIKSDDEREIRE |
| | 3v2.3- | IEEEAARILEHLEELARTGGASPAAPAPASPAAPAPSAPAGGNIDELLMQVTDLIYE |
| | 1_PAS24_ | ALHFAKDEEFQKHAFQLFEKATKAYKNKDKQKLEKVVEELKELLERILSGGASPAAP |
| | ompT | APASPAAPAPSAPAGGDKENVLQKIYEIMKELERLGHAEASMQVSDLIYEFMKTKDE |
| | | NLLEEAERLLEEVKR |
| 538 | 2- | ELEEQVMHVLDQVSELAHELLHKLTGEELERAAYFNWWATEMMLELIKSDDEREIRE |
| | 3v2.3- | IEEEARRILEHLEELARKGGASPAAPAPASPAAPAPSAPAGGNIDELLMQVTDLIYE |
| | 1_PAS24_ | ALHFAKDEEFQKHAFQLFEKATKAYKNKDKQKLEKVVEELKELLERILSGGASPAAP |
| | N- | APASPAAPAPSAPAGGDKENVLQKIYEIMKELERLGHAEASMQVSDLIYEFMKTKDE |
| | His-TEV | NLLEEAERLLEEVKR |
| 530 | 2- | ELEEQVMHVLDQVSELAHELLHKLTGEELERAAYFNWWATEMMLELIKSDDEREIRE |
| | 3v2.3- | IEEEAARILEHLEELARTGGASPAAPAPASPAAPAPSAPAGGNIDELLMQVTDLIYE |
| | 1_PAS24_ | ALHFAKDEEFQKHAFQLFEKATKAYKNKDKQKLEKVVEELKELLERILSGGASPAAP |
| | ompT | APASPAAPAPSAPAGGDKENVLQKIYEIMKELERLGHAEASMQVSDLIYEFMKTKDE |
| | N- | NLLEEAERLLEEVKR |
| | His-TEV | |
| 531 | 2-3- | ELEEQVMHVLDQVSELAHELLHKLTGEELERAAYFNWWATEMMLELIKSDDEREIRE |
| | 1_PAS24_ | IEEEARRILEHLEELARKGGASPAAPAPASPAAPAPSAPAGGNIDELLMQVTDLIYE |
| | NTSF | ALHFAKDEEFQKHAFQLFEKATKAYKNKDKQKLEKVVEELKELLERILSGGASPAAP |
| | | APASPAAPAPSAPAGGDKENVLQKIYEIMKELERLGHAEASMQVSDLIYEFMKTKDE |
| | | NLLEEAERLLEEVKR |
| 531 | 2-3- | ELEEQVMHVLDQVSELAHELLHKLTGEELERAAYFNWWATEMMLELIKSDDEREIRE |
| | 1_PAS24_ | IEEEARRILEHLEELARKGGASPAAPAPASPAAPAPSAPAGGNIDELLMQVTDLIYE |
| | NTS3F | ALHFAKDEEFQKHAFQLFEKATKAYKNKDKQKLEKVVEELKELLERILSGGASPAAP |
| | | APASPAAPAPSAPAGGDKENVLQKIYEIMKELERLGHAEASMQVSDLIYEFMKTKDE |
| | | NLLEEAERLLEEVKR |
| 531 | 2-3- | ELEEQVMHVLDQVSELAHELLHKLTGEELERAAYFNWWATEMMLELIKSDDEREIRE |
| | 1_PAS24_ | IEEEARRILEHLEELARKGGASPAAPAPASPAAPAPSAPAGGNIDELLMQVTDLIYE |
| | NTSM | ALHFAKDEEFQKHAFQLFEKATKAYKNKDKQKLEKVVEELKELLERILSGGASPAAP |
| | | APASPAAPAPSAPAGGDKENVLQKIYEIMKELERLGHAEASMQVSDLIYEFMKTKDE |
| | | NLLEEAERLLEEVKR |
| 532 | 2- | ELEEQVMHVLDQVSELAHELLHKLTGEELERAAYFNWWATEMMLELIKSDDEREIRE |
| | PAS24- | IEEEARRILEHLEELARKGGASPAAPAPASPAAPAPSAPAGGNIDELLMQVTDLIYE |
| | 3- | ALHFAKDEEFQKHAFOLFEKATKAYKNKDKQKLEKVVEELKELLERILSGGASPAAP |
| | PAS16- | APASPAGGDKENVLQKIYEIMKELERLGHAEASMQVSDLIYEFMKTKDENLLEEAER |
| | 1_NTS3F | LLEEVKR |
| 533 | 2- | ELEEQVMHVLDQVSELAHELLHKLTGEELERAAYFNWWATEMMLELIKSDDEREIRE |
| | PAS16- | IEEEARRILEHLEELARKGGASPAAPAPASPAGGNIDELLMQVTDLIYEALHFAKDE |
| | 3- | EFQKHAFQLFEKATKAYKNKDKQKLEKVVEELKELLERILSGGASPAAPAPASPAGG |
| | PAS16-1_ | DKENVLQKIYEIMKELERLGHAEASMQVSDLIYEFMKTKDENLLEEAERLLEEVKR |
| | NTS3F | |
| 534 | 2- | ELEEQVMHVLDQVSELAHELLHKLTGEELERAAYFNWWATEMMLELIKSDDEREIRE |
| | PAS11- | IEEEARRILEHLEELARKGGASPAAPAGGNIDELLMQVTDLIYEALHFAKDEEFQKH |
| | 3- | AFQLFEKATKAYKNKDKQKLEKVVEELKELLERILSGGASPAAPAPASPAGGDKENV |
| | PAS16-1_ | LQKIYEIMKELERLGHAEASMQVSDLIYEFMKTKDENLLEEAERLLEEVKR |
| | NTS3F | |
| 535 | 2- | ELEEQVMHVLDQVSELAHELLHKLTGEELERAAYFNWWATEMMLELIKSDDEREIRE |
| | PAS24- | IEEEARRILEHLEELARKGGASPAAPAPASPAAPAPSAPAGGNIDELLMQVTDLIYE |
| | 3- | ALHFAKDEEFQKHAFQLFEKATKAYKNKDKQKLEKVVEELKELLERILSGGASPAAP |
| | PAS 11-1_ | AGGDKENVLQKIYEIMKELERLGHAEASMQVSDLIYEFMKTKDENLLEEAERLLEEV |
| | NTS3F | KR |
| 536 | 2- | ELEEQVMHVLDQVSELAHELLHKLTGEELERAAYFNWWATEMMLELIKSDDEREIRE |
| | PAS16- | IEEEARRILEHLEELARKGGASPAAPAPASPAGGNIDELLMQVTDLIYEALHFAKDE |
| | 3- | EFQKHAFQLFEKATKAYKNKDKQKLEKVVEELKELLERILSGGASPAAPAGGDKENV |
| | PAS11- | LQKIYEIMKELERLGHAEASMQVSDLIYEFMKTKDENLLEEAERLLEEVKR |
| | 1_NTS3F | |
| 537 | 2- | ELEEQVMHVLDQVSELAHELLHKLTGEELERAAYFNWWATEMMLELIKSDDEREIRE |
| | PAS11- | IEEEARRILEHLEELARKGGASPAAPAGGNIDELLMQVTDLIYEALHFAKDEEFQKH |
| | 3- | AFQLFEKATKAYKNKDKQKLEKVVEELKELLERILSGGASPAAPAGGDKENVLQKIY |
| | PAS11- | EIMKELERLGHAEASMQVSDLIYEFMKTKDENLLEEAERLLEEVKR |
| | 1_NTS3F | |
| 538 | 2-2_G4 | ELEEQVMHVLDQVSELAHELLHKLTGEELERAAYFNWWATEMMLELIKSDDEREIRE |
| | | IEEEARRILEHLEELARKGGGGELEEQVMHVLDQVSELAHELLHKLTGEELERAAYF |
| | | NWWATEMMLELIKSDDEREIREIEEEARRILEHLEELARK |
| 539 | 2-2_G2 | ELEEQVMHVLDQVSELAHELLHKLTGEELERAAYFNWWATEMMLELIKSDDEREIRE |
| | | IEEEARRILEHLEELARKGGELEEQVMHVLDQVSELAHELLHKLTGEELERAAYFNW |
| | | WATEMMLELIKSDDEREIREIEEEARRILEHLEELARK |
| 540 | 2- | ELEEQVMHVLDQVSELAHELLHKLTGEELERAAYFNWWATEMMLELIKSDDEREIRE |
| | 3_PAS24 | IEEEARRILEHLEELARKGGASPAAPAPASPAAPAPSAPAGGNIDELLMQVTDLIYE |
| | | ALHFAKDEEFQKHAFQLFEKATKAYKNKDKQKLEKVVEELKELLERILS |
| 541 | 2- | ELEEQVMHVLDQVSELAHELLHKLTGEELERAAYFNWWATEMMLELIKSDDEREIRE |
| | 3_PAS16 | IEEEARRILEHLEELARKGGASPAAPAPASPAGGNIDELLMQVTDLIYEALHFAKDE |
| | | EFQKHAFQLFEKATKAYKNKDKQKLEKVVEELKELLERILS |
| 542 | 2- | ELEEQVMHVLDQVSELAHELLHKLTGEELERAAYFNWWATEMMLELIKSDDEREIRE |
| | 3_PAS11 | IEEEARRILEHLEELARKGGASPAAPAGGNIDELLMQVTDLIYEALHFAKDEEFQKH |
| | | AFQLFEKATKAYKNKDKOKLEKVVEELKELLERILS |
| 543 | 1-2- | DKENVLQKIYEIMKELERLGHAEASMQVSDLIYEFMKTKDENLLEEAERLLEEVKRG |
| | 1_PAS24 | GASPAAPAPASPAAPAPSAPAGGELEEQVMHVLDQVSELAHELLHKLTGEELERAAY |
| | | FNWWATEMMLELIKSDDEREIREIEEEARRILEHLEELARKGGASPAAPAPASPAAP |
| | | APSAPAGGDKENVLQKIYEIMKELERLGHAEASMQVSDLIYEFMKTKDENLLEEAER |
| | | LLEEVKR |
| 544 | 2- | ELEEQVMHVLDQVSELAHELLHKLTGEELERAAYFNWWATEMMLELIKSDDEREIRE |
| | PAS24- | IEEEARRILEHLEELARKGGASPAAPAPASPAAPAPSAPAGGNLDELHMQMTDLVYE |
| | 3- | ALHFAKDEEFQKHVFQLFEKATKAYKNKDRQKLEKVVEELKELLERLLSGGASPAAP |
| | PAS24- | APASPAGGDKENVLOKIYEIMKELERLGHAEASMQVSDLIYEFMKTKDENLLEEAER |
| | 1_NTS | LLEEVKR |
| 545 | 2- | ELEEQVMHVLDQVSELAHELLHKLTGEELERAAYFNWWATEMMLELIKSDDEREIRE |
| | PAS24- | IEEEARRILEHLEELARKGGASPAAPAPASPAAPAPSAPAGGNLDELHMQMTDLVYE |
| | 3- | ALHFAKDEEFQKHVFQLFEKATKAYKNKDRQKLEKVVEELKELLERLLSGGASPAAP |
| | PAS16- | APASPAAPAPSAPAGGDKENVLQKIYEIMKELERLGHAEASMQVSDLIYEFMKTKDE |
| | 1_NTS | NLLEEAERLLEEVKR |
| 546 | 2- | ELEEQVMHVLDQVSELAHELLHKLTGEELERAAYFNWWATEMMLELIKSDDEREIRE |
| | PAS16- | IEEEARRILEHLEELARKGGASPAAPAPASPAGGNLDELHMQMTDLVYEALHFAKDE |
| | 3- | EFQKHVFQLFEKATKAYKNKDRQKLEKVVEELKELLERLLSGGASPAAPAPASPAAP |
| | PAS24- | APSAPAGGDKENVLQKIYEIMKELERLGHAEASMQVSDLIYEFMKTKDENLLEEAER |
| | 1_NTS | LLEEVKR |
| 547 | 2- | ELEEQVMHVLDQVSELAHELLHKLTGEELERAAYFNWWATEMMLELIKSDDEREIRE |
| | PAS16- | IEEEARRILEHLEELARKGGASPAAPAPASPAGGNLDELHMQMTDLVYEALHFAKDE |
| | 3- | EFQKHVFQLFEKATKAYKNKDRQKLEKVVEELKELLERLLSGGASPAAPAPASPAGG |
| | PAS16- | DKENVLQKIYEIMKELERLGHAEASMQVSDLIYEFMKTKDENLLEEAERLLEEVKR |
| | 1_NTS | |
| 548 | 2- | ELEEQVMHVLDQVSELAHELLHKLTGEELERAAYFNWWATEMMLELIKSDDEREIRE |
| | PAS11- | IEEEARRILEHLEELARKGGASPAAPAGGNLDELHMQMTDLVYEALHFAKDEEFQKH |
| | 3- | VFQLFEKATKAYKNKDRQKLEKVVEELKELLERLLSGGASPAAPAPASPAGGDKENV |
| | PAS16- | LQKIYEIMKELERLGHAEASMQVSDLIYEFMKTKDENLLEEAERLLEEVKR |
| | 1_NTS | |
| 549 | 2- | ELEEQVMHVLDQVSELAHELLHKLTGEELERAAYFNWWATEMMLELIKSDDEREIRE |
| | PAS24- | IEEEARRILEHLEELARKGGASPAAPAPASPAAPAPSAPAGGNLDELHMQMTDLVYE |
| | 3- | ALHFAKDEEFQKHVFQLFEKATKAYKNKDRQKLEKVVEELKELLERLLSGGASPAAP |
| | PAS11- | AGGDKENVLQKIYEIMKELERLGHAEASMQVSDLIYEFMKTKDENLLEEAERLLEEV |
| | 1_NTS | KR |
| 550 | 2- | ELEEQVMHVLDQVSELAHELLHKLTGEELERAAYFNWWATEMMLELIKSDDEREIRE |
| | PAS16- | IEEEARRILEHLEELARKGGASPAAPAPASPAGGNLDELHMQMTDLVYEALHFAKDE |
| | 3- | EFQKHVFQLFEKATKAYKNKDRQKLEKVVEELKELLERLLSGGASPAAPAGGDKENV |
| | PAS11- | LQKIYEIMKELERLGHAEASMQVSDLIYEFMKTKDENLLEEAERLLEEVKR |
| | 1_NTS | |
| 551 | 2- | ELEEQVMHVLDQVSELAHELLHKLTGEELERAAYFNWWATEMMLELIKSDDEREIRE |
| | PAS11- | IEEEARRILEHLEELARKGGASPAAPAGGNLDELHMQMTDLVYEALHFAKDEEFQKH |
| | 3- | VFQLFEKATKAYKNKDRQKLEKVVEELKELLERLLSGGASPAAPAGGDKENVLQKIY |
| | PAS11- | EIMKELERLGHAEASMQVSDLIYEFMKTKDENLLEEAERLLEEVKR |
| | 1_NTS | |
| 552 | 2-3- | ELEEQVMHVLDQVSELAHELLHKLTGEELERAAYFNWWATEMMLELIKSDDEREIRE |
| | 1_PAS7 | IEEEARRILEHLEELARKGGASAGGNLDELHMQMTDLVYEALHFAKDEEFQKHVFQL |
| | | FEKATKAYKNKDRQKLEKVVEELKELLERLLSGGASAGGDKENVLQKIYEIMKELER |
| | | LGHAEASMQVSDLIYEFMKTKDENLLEEAERLLEEVKR |
| 553 | 2-3- | ELEEQVMHVLDQVSELAHELLHKLTGEELERAAYFNWWATEMMLELIKSDDEREIRE |
| | 1_GS7 | IEEEARRILEHLEELARKGGSGGSGGNLDELHMQMTDLVYEALHFAKDEEFQKHVFQ |
| | | LFEKATKAYKNKDRQKLEKVVEELKELLERLLSGGSGGSGGDKENVLQKIYEIMKEL |
| | | ERLGHAEASMQVSDLIYEFMKTKDENLLEEAERLLEEVKR |
| 554 | 2-3- | ELEEQVMHVLDQVSELAHELLHKLTGEELERAAYFNWWATEMMLELIKSDDEREIRE |
| | 1_GS5 | IEEEARRILEHLEELARKGGSGGNLDELHMQMTDLVYEALHFAKDEEFQKHVFQLFE |
| | | KATKAYKNKDROKLEKVVEELKELLERLLSGGSGGDKENVLQKIYEIMKELERLGHA |
| | | EASMQVSDLIYEFMKTKDENLLEEAERLLEEVKR |
| 555 | 2-3- | ELEEQVMHVLDQVSELAHELLHKLTGEELERAAYFNWWATEMMLELIKSDDEREIRE |
| | 1_GS11 | IEEEARRILEHLEELARKGGSGGSGGSGGNLDELHMQMTDLVYEALHFAKDEEFQKH |
| | | VFQLFEKATKAYKNKDROKLEKVVEELKELLERLLSGGSGGSGGSGGDKENVLQKIY |
| | | EIMKELERLGHAEASMQVSDLIYEFMKTKDENLLEEAERLLEEVKR |
| 556 | 2-2- | ELEEQVMHVLDQVSELAHELLHKLTGEELERAAYFNWWATEMMLELIKSDDEREIRE |
| | 2_PAS11 | IEEEARRILEHLEELARKGGASPAAPAGGELEEQVMHVLDQVSELAHELLHKLTGEE |
| | | LERAAYFNWWATEMMLELIKSDDEREIREIEEEARRILEHLEELARKGGASPAAPAG |
| | | GELEEQVMHVLDQVSELAHELLHKLTGEELERAAYFNWWATEMMLELIKSDDEREIR |
| | | EIEEEARRILEHLEELARK |
| 557 | 2-2- | ELEEQVMHVLDQVSELAHELLHKLTGEELERAAYFNWWATEMMLELIKSDDEREIRE |
| | 2_GS11 | IEEEARRILEHLEELARKGGSGGSGGSGGELEEQVMHVLDQVSELAHELLHKLTGEE |
| | | LERAAYFNWWATEMMLELIKSDDEREIREIEEEARRILEHLEELARKGGSGGSGGSG |
| | | GELEEQVMHVLDQVSELAHELLHKLTGEELERAAYFNWWATEMMLELIKSDDEREIR |
| | | EIEEEARRILEHLEELARK |
| 558 | 2-2- | ELEEQVMHVLDQVSELAHELLHKLTGEELERAAYFNWWATEMMLELIKSDDEREIRE |
| | 2_GS8 | IEEEARRILEHLEELARKGGSGGSGGELEEQVMHVLDQVSELAHELLHKLTGEELER |
| | | AAYFNWWATEMMLELIKSDDEREIREIEEEARRILEHLEELARKGGSGGSGGELEEQ |
| | | VMHVLDQVSELAHELLHKLTGEELERAAYFNWWATEMMLELIKSDDEREIREIEEEA |
| | | RRILEHLEELARK |
| 559 | 2-2- | ELEEQVMHVLDQVSELAHELLHKLTGEELERAAYFNWWATEMMLELIKSDDEREIRE |
| | 2_GS5 | IEEEARRILEHLEELARKGGSGGELEEQVMHVLDQVSELAHELLHKLTGEELERAAY |
| | | FNWWATEMMLELIKSDDEREIREIEEEARRILEHLEELARKGGSGGELEEQVMHVLD |
| | | QVSELAHELLHKLTGEELERAAYFNWWATEMMLELIKSDDEREIREIEEEARRILEH |
| | | LEELARK |
| 560 | 2-3- | ELEEQVMHVLDQVSELAHELLHKLTGEELERAAYFNWWATEMMLELIKSDDEREIRE |
| | 1_GGGG | IEEEARRILEHLEELARKGGSGGGGSGGGGSGGNLDELHMQMTDLVYEALHFAKDEE |
| | S15 | FQKHVFQLFEKATKAYKNKDRQKLEKVVEELKELLERLLSGGSGGGGSGGGGSGGDK |
| | | ENVLQKIYEIMKELERLGHAEASMQVSDLIYEFMKTKDENLLEEAERLLEEVKR |
| 561 | 2-3- | ELEEQVMHVLDQVSELAHELLHKLTGEELERAAYFNWWATEMMLELIKSDDEREIRE |
| | 1_GGGG | IEEEARRILEHLEELARKGGSGGGGSGGGGNLDELHMQMTDLVYEALHFAKDEEFQK |
| | S12 | HVFQLFEKATKAYKNKDRQKLEKVVEELKELLERLLSGGSGGGGSGGGGDKENVLQK |
| | | IYEIMKELERLGHAEASMQVSDLIYEFMKTKDENLLEEAERLLEEVKR |
| 562 | 2-3- | ELEEQVMHVLDQVSELAHELLHKLTGEELERAAYFNWWATEMMLELIKSDDEREIRE |
| | 1_GGGG | IEEEARRILEHLEELARKGGGGSGGGGNLDELHMQMTDLVYEALHFAKDEEFQKHVF |
| | S9 | QLFEKATKAYKNKDRQKLEKVVEELKELLERLLSGGGGSGGGGDKENVLQKIYEIMK |
| | | ELERLGHAEASMQVSDLIYEFMKTKDENLLEEAERLLEEVKR |
| 563 | 2-3- | ELEEQVMHVLDQVSELAHELLHKLTGEELERAAYFNWWATEMMLELIKSDDEREIRE |
| | 1_GGGG | IEEEARRILEHLEELARKGGGSGGGNLDELHMQMTDLVYEALHFAKDEEFQKHVFQL |
| | S7 | FEKATKAYKNKDRQKLEKVVEELKELLERLLSGGGSGGGDKENVLQKIYEIMKELER |
| | | LGHAEASMQVSDLIYEFMKTKDENLLEEAERLLEEVKR |
| 564 | 1- | DKENVLQKIYEIMKELERLGHAEASMQVSDLIYEFMKTKDENLLEEAERLLEEVKRG |
| | 1_GGGG | GSGGGGSGGGGSGGGGSGGGGSGGDKENVLQKIYEIMKELERLGHAEASMQVSDLIY |
| | S25 | EFMKTKDENLLEEAERLLEEVKR |
| 565 | 1- | DKENVLQKIYEIMKELERLGHAEASMQVSDLIYEFMKTKDENLLEEAERLLEEVKRG |
| | 1_GGGG | GSGGGGSGGGGSGGGGSGGDKENVLQKIYEIMKELERLGHAEASMQVSDLIYEFMKT |
| | S20 | KDENLLEEAERLLEEVKR |
| 566 | 1- | DKENVLQKIYEIMKELERLGHAEASMQVSDLIYEFMKTKDENLLEEAERLLEEVKRG |
| | 1_GGGG | GSGGGGSGGGGSGGDKENVLQKIYEIMKELERLGHAEASMQVSDLIYEFMKTKDENL |
| | S15 | LEEAERLLEEVKR |
| 567 | 1- | DKENVLQKIYEIMKELERLGHAEASMQVSDLIYEFMKTKDENLLEEAERLLEEVKRG |
| | 1_GGGG | GSGGGGSGGDKENVLQKIYEIMKELERLGHAEASMQVSDLIYEFMKTKDENLLEEAE |
| | S10 | RLLEEVKR |
| 568 | 2- | ELEEQVMHVLDQVSELAHELLHKLTGEELERAAYFNWWATEMMLELIKSDDEREIRE |
| | 1_GGGG | IEEEARRILEHLEELARKGGSGGGGSGGDKENVLQKIYEIMKELERLGHAEASMQVS |
| | S10 | DLIYEFMKTKDENLLEEAERLLEEVKR |
| 569 | 3- | NLDELHMQMTDLVYEALHFAKDEEFQKHVFQLFEKATKAYKNKDRQKLEKVVEELKE |
| | 1_GGGG | LLERLLSGGSGGGGSGGDKENVLQKIYEIMKELERLGHAEASMQVSDLIYEFMKTKD |
| | S10 | ENLLEEAERLLEEVKR |
| 570 | 2- | ELEEQVMHVLDQVSELAHELLHKLTGEELERAAYFNWWATEMMLELIKSDDEREIRE |
| | 3_GGGG | IEEEARRILEHLEELARKGGSGGGGSGGNLDELHMQMTDLVYEALHFAKDEEFQKHV |
| | S10 | FQLFEKATKAYKNKDRQKLEKVVEELKELLERLLS |
| 571 | 3- | NLDELHMQMTDLVYEALHFAKDEEFQKHVFQLFEKATKAYKNKDRQKLEKVVEELKE |
| | 2_GGGG | LLERLLSGGSGGGGSGGELEEQVMHVLDQVSELAHELLHKLTGEELERAAYFNWWAT |
| | S10 | EMMLELIKSDDEREIREIEEEARRILEHLEELARK |
| 572 | 2-3- | ELEEQVMHVLDQVSELAHELLHKLTGEELERAAYFNWWATEMMLELIKSDDEREIRE |
| | 1_GGGG | IEEEARRILEHLEELARKGGSGGGGSGGNLDELHMQMTDLVYEALHFAKDEEFQKHV |
| | S10 | FQLFEKATKAYKNKDRQKLEKVVEELKELLERLLSGGSGGGGSGGDKENVLQKIYEI |
| | | MKELERLGHAEASMQVSDLIYEFMKTKDENLLEEAERLLEEVKR |
| 573 | 3-2- | NLDELHMQMTDLVYEALHFAKDEEFQKHVFQLFEKATKAYKNKDRQKLEKVVEELKE |
| | 1_GGGG | LLERLLSGGSGGGGSGGELEEQVMHVLDQVSELAHELLHKLTGEELERAAYFNWWAT |
| | S10 | EMMLELIKSDDEREIREIEEEARRILEHLEELARKGGSGGGGSGGDKENVLQKIYEI |
| | | MKELERLGHAEASMQVSDLIYEFMKTKDENLLEEAERLLEEVKR |
| 560 | 2-3- | ELEEQVMHVLDQVSELAHELLHKLTGEELERAAYFNWWATEMMLELIKSDDEREIRE |
| | 1_GGGG | IEEEARRILEHLEELARKGGSGGGGSGGGGSGGNLDELHMQMTDLVYEALHFAKDEE |
| | S15 | FQKHVFQLFEKATKAYKNKDROKLEKVVEELKELLERLLSGGSGGGGSGGGGSGGDK |
| | | ENVLQKIYEIMKELERLGHAEASMQVSDLIYEFMKTKDENLLEEAERLLEEVKR |
| 574 | 3-2- | NLDELHMQMTDLVYEALHFAKDEEFQKHVFQLFEKATKAYKNKDRQKLEKVVEELKE |
| | 1_GGGG | LLERLLSGGSGGGGSGGGGSGGELEEQVMHVLDQVSELAHELLHKLTGEELERAAYF |
| | S15 | NWWATEMMLELIKSDDEREIREIEEEARRILEHLEELARKGGSGGGGSGGGGSGGDK |
| | | ENVLQKIYEIMKELERLGHAEASMQVSDLIYEFMKTKDENLLEEAERLLEEVKR |
| 575 | LCB3- | NLDELHMQMTDLVYEALHFAKDEEFQKHVFQLFEKATKAYKNKDRQKLEKVVEELKE |
| | LCB1_ | LLERLLSGGASPAAPAPGGDKENVLQKIYEIMKELERLGHAEASMQVSDLIYEFMKT |
| | PAS12 | KDENLLEEAERLLEEVKR |
| 576 | AHB2- | ELEEQVMHVLDQVSELAHELLHKLTGEELERAAYFNWWATEMMLELIKSDDEREIRE |
| | LCB1_ | IEEEARRILEHLEELARKGGASPAAPAPGGDKENVLQKIYEIMKELERLGHAEASMQ |
| | PAS12 | VSDLIYEFMKTKDENLLEEAERLLEEVKR |
| 577 | AHB2- | ELEEQVMHVLDQVSELAHELLHKLTGEELERAAYFNWWATEMMLELIKSDDEREIRE |
| | LCB3_ | IEEEARRILEHLEELARKGGASPAAPAPGGNLDELHMQMTDLVYEALHFAKDEEFQK |
| | PAS12 | HVFQLFEKATKAYKNKDRQKLEKVVEELKELLERLLS |
| 578 | LCB3- | NLDELHMQMTDLVYEALHFAKDEEFQKHVFQLFEKATKAYKNKDRQKLEKVVEELKE |
| | AHB2_ | LLERLLSGGASPAAPAPGGELEEQVMHVLDQVSELAHELLHKLTGEELERAAYFNWW |
| | PAS12 | ATEMMLELIKSDDEREIREIEEEARRILEHLEELARK |
| 579 | AHB2- | ELEEQVMHVLDQVSELAHELLHKLTGEELERAAYFNWWATEMMLELIKSDDEREIRE |
| | LCB3- | IEEEARRILEHLEELARKGGASPAAPAPGGNLDELHMQMTDLVYEALHFAKDEEFQK |
| | LCB1_ | HVFQLFEKATKAYKNKDROKLEKVVEELKELLERLLSGGASPAAPAPGGDKENVLQK |
| | PAS12 | IYEIMKELERLGHAEASMQVSDLIYEFMKTKDENLLEEAERLLEEVKR |
| 580 | LCB3- | NLDELHMQMTDLVYEALHFAKDEEFQKHVFQLFEKATKAYKNKDRQKLEKVVEELKE |
| | AHB2- | LLERLLSGGASPAAPAPGGELEEQVMHVLDQVSELAHELLHKLTGEELERAAYFNWW |
| | LCB1_ | ATEMMLELIKSDDEREIREIEEEARRILEHLEELARKGGASPAAPAPGGDKENVLQK |
| | PAS12 | IYEIMKELERLGHAEASMQVSDLIYEFMKTKDENLLEEAERLLEEVKR |
| 581 | LCB3- | NLDELHMQMTDLVYEALHFAKDEEFQKHVFQLFEKATKAYKNKDRQKLEKWEELKE |
| | AHB2- | LLERLLSGGASPAAPAPASPAAPAPSAPAGGELEEQVMHVLDQVSELAHELLHKLTG |
| | LCB1_ | EELERAAYFNWWATEMMLELIKSDDEREIREIEEEARRILEHLEELARKGGASPAAP |
| | PAS24 | APASPAAPAPSAPAGGDKENVLQKIYEIMKELERLGHAEASMQVSDLIYEFMKTKDE |
| | | NLLEEAERLLEEVKR |
| 582 | AHB2v2- | ELEEQVMHVLDQVSELAHELLHKLTGEELERAAYFNWWATEMMLELIKSDDEREIRE |
| | LCB1_ | IEEEAARILEHLEELARTGGASPAAPAPGGDKENVLQKIYEIMKELERLGHAEASMQ |
| | PAS12 | VSDLIYEFMKTKDENLLEEAERLLEEVKR |
| 583 | AHB2v2- | ELEEQVMHVLDQVSELAHELLHKLTGEELERAAYFNWWATEMMLELIKSDDEREIRE |
| | LCB3_ | IEEEAARILEHLEELARTGGASPAAPAPGGNLDELHMQMTDLVYEALHFAKDEEFQK |
| | PAS12 | HVFQLFEKATKAYKNKDRQKLEKVVEELKELLERLLS |
| 584 | LCB3- | NLDELHMQMTDLVYEALHFAKDEEFQKHVFQLFEKATKAYKNKDRQKLEKVVEELKE |
| | AHB2v2_ | LLERLLSGGASPAAPAPGGELEEQVMHVLDQVSELAHELLHKLTGEELERAAYFNWW |
| | PAS12 | ATEMMLELIKSDDEREIREIEEEAARILEHLEELART |
| 585 | AHB2v2- | ELEEQVMHVLDQVSELAHELLHKLTGEELERAAYFNWWATEMMLELIKSDDEREIRE |
| | LCB3- | IEEEAARILEHLEELARTGGASPAAPAPGGNLDELHMQMTDLVYEALHFAKDEEFQK |
| | LCB1_ | HVFQLFEKATKAYKNKDRQKLEKVVEELKELLERLLSGGASPAAPAPGGDKENVLQK |
| | PAS12 | IYEIMKELERLGHAEASMQVSDLIYEFMKTKDENLLEEAERLLEEVKR |
| 586 | LCB3- | NLDELHMQMTDLVYEALHFAKDEEFQKHVFQLFEKATKAYKNKDRQKLEKVVEELKE |
| | AHB2v2- | LLERLLSGGASPAAPAPGGELEEQVMHVLDQVSELAHELLHKLTGEELERAAYFNWW |
| | LCB1_ | ATEMMLELIKSDDEREIREIEEEAARILEHLEELARTGGASPAAPAPGGDKENVLQK |
| | PAS12 | IYEIMKELERLGHAEASMOVSDLIYEFMKTKDENLLEEAERLLEEVKR |
| 587 | AHB2v2- | ELEEQVMHVLDQVSELAHELLHKLTGEELERAAYFNWWATEMMLELIKSDDEREIRE |
| | LCB3- | IEEEAARILEHLEELARTGGASPAAPAPASPAAPAPSAPAGGNLDELHMQMTDLVYE |
| | LCB1_ | ALHFAKDEEFQKHVFQLFEKATKAYKNKDRQKLEKVVEELKELLERLLSGGASPAAP |
| | PAS24 | APASPAAPAPSAPAGGDKENVLQKIYEIMKELERLGHAEASMQVSDLIYEFMKTKDE |
| | | NLLEEAERLLEEVKR |
| 588 | LCB3- | NLDELHMQMTDLVYEALHFAKDEEFQKHVFQLFEKATKAYKNKDRQKLEKVVEELKE |
| | AHB2v2- | LLERLLSGGASPAAPAPASPAAPAPSAPAGGELEEQVMHVLDQVSELAHELLHKLTG |
| | LCB1_ | EELERAAYFNWWATEMMLELIKSDDEREIREIEEEAARILEHLEELARTGGASPAAP |
| | PAS24 | APASPAAPAPSAPAGGDKENVLQKIYEIMKELERLGHAEASMQVSDLIYEFMKTKDE |
| | | NLLEEAERLLEEVKR |

[0091] In some embodiments, the polypeptides comprise an amino acid sequence at least 50%, 55%, 60%, 65%, 70%, 75%, 80%, 85%, 90%, 91%, 92%, 93%, 94%, 95%, 96%, 97%, 98%, 99%, or 100% identical to the amino acid sequence of a genus selected from those recited in the middle column of Table 8. In these embodiments, X1, X2, X3 (when recited in the genus), and X4 (when recited in the genus) may be present or absent, and when present may be any sequence of 1 or more amino acids. By way of example, the genus in the middle column, first row of sequences in Table 8 is X1-(SEQ ID NO:4)-X2-(SEQ ID NO:4). In this embodiment, X2 may be present or absent and, when present, may (for example) comprise an amino acid linker of any suitable length and amino acid composition as deemed appropriate. X1 may be present or absent, and when present may comprise any amino acid residue or residues as deemed appropriate, including but not limited to a leader sequence, a detectable tag, a purification tag, etc.

[0092] In another example, the genus in the middle column, last row of sequences in Table 8 is X1-(SEQ ID NO: 155)-X2-(SEQ ID NO: 164)-X3-(SEQ ID NO: 135)-X4. In this embodiment, X2 and X3 may be present or absent and, when present, may (for example) comprise an amino acid linker of any suitable length and amino acid composition as deemed appropriate. X1 and X4 may be present or absent, and when present may comprise any amino acid residue or residues as deemed appropriate, including but not limited to a leader sequence, a detectable tag, a purification tag, secretion signal etc.

[0093] In some embodiments, the optional domain that is present between monomer domains is present and may comprise an amino acid linker. Under this embodiment, (a) in the first example above X2 would be present and comprise an amino acid linker of any appropriate length and amino acid composition, and X1 may be present or absent; and (b) in the second example above one or both of X2 and X3 would be present and comprise an amino acid linker of any appropriate length and amino acid composition, and X1 and X4 may independently be present or absent.

[0094] In any embodiment or combination of embodiments of the polypeptides disclosed herein, the polypeptide may further comprise one or more additional functional peptide domain. Any such additional functional peptide domain may be used as appropriate for an intended purpose. In various non-limiting embodiments, the additional functional peptide domain may comprise, for example, a targeting domain, a detectable domain, a scaffold domain, a secretion signal, an Fc domain, or a further therapeutic peptide domain. In one embodiment, the additional functional domain comprises an Fc domain, including but not limited to an Fc domain comprising an amino acid sequence comprising the amino acid sequence of SEQ ID NO:64.

Fc domain :
(SEQ ID NO: 64)
EPKSSDKTHTCPPCPAPELLGGPSVFLFPPKPKDTLMISRTPEVTCVVV
DVSHEDPEVKFNWYVDGVEVHNAKTKPREEQYNSTYRVVSVLTVLHQDW
LNGKEYKCKVSNKALPAPIEKTISKAKGQPREPQVYTLPPSRDELTKNQ
VSLTCLVKGFYPSDIAVEWESNGQPENNYKTTPPVLDSDGSFFLYSKLT
VDKSRWQQGNVFSCSVMHEALHNHYTQKSLSLSPGK

[0095] In another embodiment, the added functional domain may comprise an oligomerization domain. Any oligomerization domain may be used as suitable to generate an oligomer as suitable for an intended purpose. In one non-limiting embodiment, the oligomerization domain may comprise a homotrimerization domain. Exemplary oligomerization domains may comprises an amino acid sequence selected from the group consisting of SEQ ID NOS:179-189 and 589-594.

1rfo
(SEQ ID NO: 179)
GYIPEAPRDGQAYVRKDGEWVLLSTFL
1na0_int2-R3
(SEQ ID NO: 180)
EEAELAYLLGELAYKLGEYRIAIRAYRIALKRDPNNAEAWYNLGNAYYKQGDYDEAIEYY
QKALELDPNNAEAKQNLGNAKQKQG
1na0_int2
(SEQ ID NO: 181)
EEAELAYLLGELAYKLGEYRIAIRAYRIALKRDPNNAEAWYNLGNAYYKQGDYDEAIEYYQKALEL
DPNNAEAWYNLGNAYYKQGDYDEAIEYYQKALELDPNNAEAKQNLGNAKQKQG
6msr
(SEQ ID NO: 182)
GSEYEIRKALEELKASTAELKRATASLRASTEELKKNPSEDALVENNRLIVEHNA
IIVENNRIIAAVLELIVRAIK
1gcm
(SEQ ID NO: 183)
RMKQIEDKIEEILSKIYHIENEIARIKKLIGER
PRO-2-noHis
(SEQ ID NO: 184)
GSEYEIRKALEELKASTAELKRSTASLRASTEELKKNPSEDALVENNRLIVENNA
IIVENNRIIAAVLELIVRAIK
1na0_3
(SEQ ID NO: 185)
NLAEKMYKAGNAMYRKGQYTIAIIAYTLALLKDPNNAEAWYNLGNAAYKKGEYDEAIEAYQKALELDP
NNAEAWYNLGNAYYKQGDYDEAIEYYQKALELDPNNAEAKQNLGNAKQKQG
4pn9
(SEQ ID NO: 186)
GEIAKSLKEIAKSLKEIAWSLKEIAKSLKG
SB175
(SEQ ID NO: 187)
SEALEELEKALRELKKSTDELERSTEELEKNPSEDALVENNRLIVENNKIIVE
VLRIIAKVLK
SB175.1
(SEQ ID NO: 188)
SPELEKALRELKKSTDELERSTEELEKNGSPEALVENNRLIVENNKIIVEVLR
IIAK
SB175.2
(SEQ ID NO: 189)
SEKALRELKKSTDELERSTEELEKNGSPEALVENNRLIVENNKIIVEVLR
5L6HC3_1
(SEQ ID NO: 589)
SEELRAVADLQRLNIELARKLLEAVARLQELNIDLVRKTSELTDEKTIREE
IRKVKEESKRIVEEAEEEIRRAKEESRKIADESR
36729.2
(SEQ ID NO: 590)
EEAELAYLLGELAYKLGEYRIAIRAYRIALKRDPNNAEAWYNLGNAYYKQG
DYDEAIEYYQKALELDPNNAEAWYNLGNAYYKQGDYDEAIEYYQKALELDP
NNAEAWYNLGNAYYKQGDYDEAIEYYQKALEL
1na0_int2-R3v2
(SEQ ID NO: 591)
EEAELAYLLGELAYKLGEYRIAIRAYRIALKRDPNNAEAWYNLGNAYYKQG
DYDEAIYYQKALELDPNNAEAKQNLGNAKQKQ
1na0_int2-R3v3
(SEQ ID NO: 592)
EEAELAYLLGELAYKLGEYRIAIRAYRIALKRDPNNAEAWYNLGNAYYKQG
DYDEIEYYQKALELDPNNAEAKQNLGNAKQKQ
1na0_int2 v2
(SEQ ID NO: 593)
EEAELAYLLGELAYKLGEYRIAIRAYRIALKRDPNNAEAWYNLGNAYYKQG
DYDEAIYYQKALELDPNNAEAWYNLGNAYYKQGDYDEAIEYYQKALELDPN
NAEAKqNLGNKQKQ
6msrv2
(SEQ ID NO: 594)
EYEIRKALEELKASTAELKRATASLRASTEELKKNPSEDALVENNRLIVEH
NAIIVENRIIAAVLELIVRAIK

[0096] In one embodiment, the polypeptide comprises an amino acid sequence at least 50%, 55%, 60%, 65%, 70%, 75%, 80%, 85%, 90%, 91%, 92%, 93%, 94%, 95%, 96%, 97%, 98%, 99%, or 100% identical to the amino acid sequence selected from the group consisting of SEQ ID NOS 356-453 and 595-692 and a genus selected from those recited in the right hand column of Table 9 wherein genus positions X1, X2, X3, and X4 may be present or absent, and when present may be any sequence of 1 or more amino acids. In all embodiments, any N-terminal methionine residues may be present or absent in the polypeptide. In one embodiment, any N-terminal methionine residues are absent in the polypeptide.

TABLE 9
Homotrimer Designs

| | | Annotated: X1, X2, X3, and X4 may be |
|---|---|---|
| | | present or absent, and when present |
| Name | Protein | may be any sequence of 1 or more amino acids |
| AHB2- | MEKKIELEEQVMHVLDQVSELAHELLH | X1- |
| 6GS-1rfo | KLTGEELERAAYFNWWATEMMLELIKS | ELEEQVMHVLDQVSELAHELLHKLTGEELERAAYFNW |
| | DDEREIREIEEEARRILEHLEELARKG | WATEMMLELIKSDDEREIREIEEEARRILEHLEELAR |
| | SGSGSGYIPEAPRDGQAYVRKDGEWVL | K(SEQ ID NO: 101) -X2- |
| | LSTFLGGSGSSGSAWSHPQFEKGGGSG | GYIPEAPRDGQAYVRKDGEWVLLSTFL (SEQ ID |
| | GGSGGSAWSHPQFEK(SEQ ID NO: | NO: 179)-X3 |
| | 356) | |
| AHB2- | MEKKIELEEQVMHVLDQVSELAHELLH | X1- |
| 28GS- | KLTGEELERAAYFNWWATEMMLELIKS | ELEEQVMHVLDQVSELAHELLHKLTGEELERAAYFNW |
| AHB2- | DDEREIREIEEEARRILEHLEELARKG | WATEMMLELIKSDDEREIREIEEEARRILEHLEELAR |
| 6GS-1rfo | SGSGSGSGSGSGSGSGSGSGSGSGSGS | K(SEQ ID NO: 101) -X2- |
| | ELEEQVMHVLDQVSELAHELLHKLTGE | ELEEQVMHVLDQVSELAHELLHKLTGEELERAAYFNW |
| | ELERAAYFNWWATEMMLELIKSDDERE | WATEMMLELIKSDDEREIREIEEEARRILEHLEELAR |
| | IREIEEEARRILEHLEELARKGSGSGS | K(SEQ ID NO: 101) -X3- |
| | GYIPEAPRDGQAYVRKDGEWVLLSTFL | GYIPEAPRDGQAYVRKDGEWVLLSTFL (SEQ ID |
| | GGSGSSGSAWSHPQFEKGGGSGGGSGG | NO: 179) -X4 |
| | SAWSHPQFEK (SEQ ID NO: 357) | |
| AHB2- | MEKKIELEEQVMHVLDQVSELAHELLH | X1- |
| 5GS-1rfo | KLTGEELERAAYFNWWATEMMLELIKS | ELEEQVMHVLDQVSELAHELLHKLTGEELERAAYFNW |
| | DDEREIREIEEEARRILEHLEELARKG | WATEMMLELIKSDDEREIREIEEEARRILEHLEELAR |
| | SGSGGYIPEAPRDGQAYVRKDGEWVLL | K(SEQ ID NO: 101) -X2- |
| | STFLGGSGSSGSAWSHPQFEKGGGSGG | GYIPEAPRDGQAYVRKDGEWVLLSTFL (SEQ ID |
| | GSGGSAWSHPQFEK (SEQ ID NO: | NO: 179) -X3 |
| | 358) | |
| AHB2- | MEKKIELEEQVMHVLDQVSELAHELLH | X1- |
| 4GS-1rfo | KLTGEELERAAYFNWWATEMMLELIKS | ELEEQVMHVLDQVSELAHELLHKLTGEELERAAYFNW |
| | DDEREIREIEEEARRILEHLEELARKG | WATEMMLELIKSDDEREIREIEEEARRILEHLEELAR |
| | SGSGYIPEAPRDGQAYVRKDGEWVLLS | K(SEQ ID NO: 101) -X2- |
| | TFLGGSGSSGSAWSHPQFEKGGGSGGG | GYIPEAPRDGQAYVRKDGEWVLLSTFL (SEQ ID |
| | SGGSAWSHPQFEK(SEQ ID NO: | NO: 179)-X3 |
| | 359) | |
| AHB2- | MEKKIELEEQVMHVLDQVSELAHELLH | X1- |
| 3GS-1rfo | KLTGEELERAAYFNWWATEMMLELIKS | ELEEQVMHVLDQVSELAHELLHKLTGEELERAAYFNW |
| | DDEREIREIEEEARRILEHLEELARKG | WATEMMLELIKSDDEREIREIEEEARRILEHLEELAR |
| | SGGYIPEAPRDGQAYVRKDGEWVLLST | K(SEQ ID NO: 101)-X2- |
| | FLGGSGSSGSAWSHPQFEKGGGSGGGS | GYIPEAPRDGQAYVRKDGEWVLLSTFL (SEQ ID |
| | GGSAWSHPQFEK (SEQ ID NO: | NO: 179)-X3 |
| | 360) | |
| AHB2- | MEKKIELEEQVMHVLDQVSELAHELLH | X1- |
| 28GS- | KLTGEELERAAYFNWWATEMMLELIKS | ELEEQVMHVLDQVSELAHELLHKLTGEELERAAYFNW |
| AHB2- | DDEREIREIEEEARRILEHLEELARKG | WATEMMLELIKSDDEREIREIEEEARRILEHLEELAR |
| 3GS-1rfo | SGSGSGSGSGSGSGSGSGSGSGSGSGS | K(SEQ ID NO: 101)-X2- |
| | ELEEQVMHVLDQVSELAHELLHKLTGE | ELEEQVMHVLDQVSELAHELLHKLTGEELERAAYFNW |
| | ELERAAYFNWWATEMMLELIKSDDERE | WATEMMLELIKSDDEREIREIEEEARRILEHLEELAR |
| | IREIEEEARRILEHLEELARKGSGGYI | K(SEQ ID NO: 101)-X3- |
| | PEAPRDGQAYVRKDGEWVLLSTFLGGS | GYIPEAPRDGQAYVRKDGEWVLLSTFL (SEQ ID |
| | GSSGSAWSHPQFEKGGGSGGGSGGSAW | NO: 179)-X4 |
| | SHPQFEK (SEQ ID NO: 361) | |
| AHB2- | MEKKIELEEQVMHVLDQVSELAHELLH | X1- |
| 4GS- | KLTGEELERAAYFNWWATEMMLELIKS | ELEEQVMHVLDQVSELAHELLHKLTGEELERAAYFNW |
| 5L6HC3_1 | DDEREIREIEEEARRILEHLEELARKG | WATEMMLELIKSDDEREIREIEEEARRILEHLEELAR |
| | SGSSEELRAVADLORLNIELARKLLEA | K(SEQ ID NO: 101)-X2- |
| | VARLQELNIDLVRKTSELTDEKTIREE | SEELRAVADLQRLNIELARKLLEAVARLQELNIDLVR |
| | IRKVKEESKRIVEEAEEEIRRAKEESR | KTSELTDEKTIREEIRKVKEESKRIVEEAEEEIRRAK |
| | KIADESRGGSGSSGSAWSHPQFEKGGG | EESRKIADESR (SEQ ID NO: 589) |
| | SGGGSGGSAWSHPQFEK (SEQ ID | |
| | NO: 362) | |
| AHB2- | MEKKIELEEQVMHVLDQVSELAHELLH | X1- |
| 5GS- | KLTGEELERAAYFNWWATEMMLELIKS | ELEEQVMHVLDQVSELAHELLHKLTGEELERAAYFNW |
| 5L6HC3_1 | DDEREIREIEEEARRILEHLEELARKG | WATEMMLELIKSDDEREIREIEEEARRILEHLEELAR |
| | SGSGSEELRAVADLORLNIELARKLLE | K(SEQ ID NO: 101)-X2- |
| | AVARLQELNIDLVRKTSELTDEKTIRE | SEELRAVADLQRLNIELARKLLEAVARLQELNIDLVR |
| | EIRKVKEESKRIVEEAEEEIRRAKEES | KTSELTDEKTIREEIRKVKEESKRIVEEAEEEIRRAK |
| | RKIADESRGGSGSSGSAWSHPQFEKGG | EESRKIADESR (SEQ ID NO: 589) |
| | GSGGGSGGSAWSHPQFEK (SEQ ID | |
| | NO: 363) | |
| AHB2- | MEKKIELEEQVMHVLDQVSELAHELLH | X1- |
| 28GS- | KLTGEELERAAYFNWWATEMMLELIKS | ELEEQVMHVLDQVSELAHELLHKLTGEELERAAYFNW |
| AHB2- | DDEREIREIEEEARRILEHLEELARKG | WATEMMLELIKSDDEREIREIEEEARRILEHLEELAR |
| 4GS- | SGSGSGSGSGSGSGSGSGSGSGSGSGS | K(SEQ ID NO: 101)-X2- |
| 5L6HC3_1 | ELEEQVMHVLDQVSELAHELLHKLTGE | ELEEQVMHVLDQVSELAHELLHKLTGEELERAAYFNW |
| | ELERAAYFNWWATEMMLELIKSDDERE | WATEMMLELIKSDDEREIREIEEEARRILEHLEELAR |
| | IREIEEEARRILEHLEELARKGSGSSE | K(SEQ ID NO: 101)-X3 |
| | ELRAVADLORLNIELARKLLEAVARLQ | |
| | ELNIDLVRKTSELTDEKTIREEIRKVK | |
| | EESKRIVEEAEEEIRRAKEESRKIADE | |
| | SRGGSGSSGSAWSHPQFEKGGGSGGGS | |
| | GGSAWSHPQFEK (SEQ ID NO: | |
| | 364) | |
| AHB2- | MEKKIELEEQVMHVLDQVSELAHELLH | X1- |
| 28GS- | KLTGEELERAAYFNWWATEMMLELIKS | ELEEQVMHVLDQVSELAHELLHKLTGEELERAAYFNW |
| AHB2- | DDEREIREIEEEARRILEHLEELARKG | WATEMMLELIKSDDEREIREIEEEARRILEHLEELAR |
| 5GS- | SGSGSGSGSGSGSGSGSGSGSGSGSGS | K(SEQ ID NO: 101)-X2- |
| 5L6HC3_1 | ELEEQVMHVLDQVSELAHELLHKLTGE | ELEEQVMHVLDQVSELAHELLHKLTGEELERAAYFNW |
| | ELERAAYFNWWATEMMLELIKSDDERE | WATEMMLELIKSDDEREIREIEEEARRILEHLEELAR |
| | IREIEEEARRILEHLEELARKGSGSGS | K(SEQ ID NO: 101)-X3 |
| | EELRAVADLQRLNIELARKLLEAVARL | |
| | QELNIDLVRKTSELTDEKTIREEIRKV | |
| | KEESKRIVEEAEEEIRRAKEESRKIAD | |
| | ESRGGSGSSGSAWSHPQFEKGGGSGGG | |
| | SGGSAWSHPQFEK (SEQ ID NO: | |
| | 365) | |
| LCB3- | MEKKINLDELHMQMTDLVYEALHFAKD | X1- |
| 6GS-1rfo | EEFQKHVFQLFEKATKAYKNKDRQKLE | NLDELHMQMTDLVYEALHFAKDEEFQKHVFQLFEKAT |
| | KVVEELKELLERLLSGSGSGSGYIPEA | KAYKNKDRQKLEKVVEELKELLERLLS (SEQ |
| | PRDGQAYVRKDGEWVLLSTFLGGSGSS | ID NO: 155)-X2- |
| | GSAWSHPQFEKGGGSGGGSGGSAWSHP | GYIPEAPRDGQAYVRKDGEWVLLSTFL (SEQ ID |
| | QFEK (SEQ ID NO: 366) | NO: 179)-X3 |
| LCB3- | MEKKINLDELHMQMTDLVYEALHFAKD | X1- |
| 5GS-1rfo | EEFQKHVFQLFEKATKAYKNKDRQKLE | NLDELHMQMTDLVYEALHFAKDEEFQKHVFQLFEKAT |
| | KVVEELKELLERLLSGSGSGGYIPEAP | KAYKNKDROKLEKVVEELKELLERLLS (SEQ ID |
| | RDGQAYVRKDGEWVLLSTFLGGSGSSG | NO: 155)-X2- |
| | SAWSHPQFEKGGGSGGGSGGSAWSHPQ | GYIPEAPRDGQAYVRKDGEWVLLSTFL (SEQ ID |
| | FEK (SEQ ID NO: 367) | NO: 179)-X3 |
| LCB3- | MEKKINLDELHMQMTDLVYEALHFAKD | X1- |
| 4GS-1rfo | EEFQKHVFQLFEKATKAYKNKDRQKLE | NLDELHMQMTDLVYEALHFAKDEEFQKHVFQLFEKAT |
| | KVVEELKELLERLLSGSGSGYIPEAPR | KAYKNKDROKLEKVVEELKELLERLLS (SEQ ID |
| | DGQAYVRKDGEWVLLSTFLGGSGSSGS | NO: 155)-X2- |
| | AWSHPQFEKGGGSGGGSGGSAWSHPQF | GYIPEAPRDGQAYVRKDGEWVLLSTFL (SEQ ID |
| | EK (SEQ ID NO: 368) | NO: 179)-X3 |
| LCB3- | MEKKINLDELHMQMTDLVYEALHFAKD | X1- |
| 5GS- | EEFQKHVFQLFEKATKAYKNKDRQKLE | NLDELHMQMTDLVYEALHFAKDEEFQKHVFQLFEKAT |
| 5L6HC3_1 | KVVEELKELLERLLSGSGSGSEELRAV | KAYKNKDROKLEKVVEELKELLERLLS (SEQ ID |
| | ADLQRLNIELARKLLEAVARLQELNID | NO: 155)-X2- |
| | LVRKTSELTDEKTIREEIRKVKEESKR | SEELRAVADLQRLNIELARKLLEAVARLQELNIDLVR |
| | IVEEAEEEIRRAKEESRKIADESRGGS | KTSELTDEKTIREEIRKVKEESKRIVEEAEEEIRRAK |
| | GSSGSAWSHPQFEKGGGSGGGSGGSAW | EESRKIADESR (SEQ ID NO: 589) |
| | SHPQFEK (SEQ ID NO: 369) | |
| LCB3- | MEKKINLDELHMQMTDLVYEALHFAKD | X1- |
| 28GS- | EEFQKHVFQLFEKATKAYKNKDRQKLE | NLDELHMQMTDLVYEALHFAKDEEFQKHVFQLFEKAT |
| LCB3- | KVVEELKELLERLLSGSGSGSGSGSGS | KAYKNKDRqKLEKVVEELKELLERLLS (SEQ ID |
| 4GS- | GSGSGSGSGSGSGSGSNLDELHMQMTD | NO: 155)-X2- |
| 5L6HC3_1 | LVYEALHFAKDEEFQKHVFQLFEKATK | NLDELHMQMTDLVYEALHFAKDEEFQKHVFQLFEKAT |
| | AYKNKDRQKLEKVVEELKELLERLLSG | KAYKNKDRQKLEKVVEELKELLERLLS ( SEQ ID |
| | SGSSEELRAVADLQRLNIELARKLLEA | NO: 155)-X3 |
| | VARLQELNIDLVRKTSELTDEKTIREE | |
| | IRKVKEESKRIVEEAEEEIRRAKEESR | |
| | KIADESRGGSGSSGSAWSHPQFEKGGG | |
| | SGGGSGGSAWSHPQFEK (SEQ ID | |
| | NO: 370) | |
| LCB3- | MEKKINLDELHMQMTDLVYEALHFAKD | X1- |
| 28GS- | EEFQKHVFQLFEKATKAYKNKDRQKLE | NLDELHMQMTDLVYEALHFAKDEEFQKHVFQLFEKAT |
| LCB3- | KVVEELKELLERLLSGSGSGSGSGSGS | KAYKNKDROKLEKVVEELKELLERLLS (SEQ ID |
| 5GS- | GSGSGSGSGSGSGSGSNLDELHMQMTD | NO: 155)-X2- |
| 5L6HC3_1 | LVYEALHFAKDEEFQKHVFQLFEKATK | NLDELHMQMTDLVYEALHFAKDEEFQKHVFQLFEKAT |
| | AYKNKDRQKLEKVVEELKELLERLLSG | KAYKNKDRQKLEKVVEELKELLERLLS (SEQ ID |
| | SGSGSEELRAVADLORLNIELARKLLE | NO: 155)-X3 |
| | AVARLQELNIDLVRKTSELTDEKTIRE | |
| | EIRKVKEESKRIVEEAEEEIRRAKEES | |
| | RKIADESRGGSGSSGSAWSHPQFEKGG | |
| | GSGGGSGGSAWSHPQFEK (SEQ ID | |
| | NO: 371) | |
| 36729.2_ | MEKKIEEAELAYLLGELAYKLGEYRIA | X1- |
| LCB1v2.2_ | IRAYRIALKRDPNNAEAWYNLGNAYYK | DKENVLQKIYEIMKELERLGHAEASMQVSDLIYEFMK |
| 6GS | QGDYDEAIEYYQKALELDPNNAEAWYN | TKDENLLEEAERLLEEVKR (SEQ ID NO: |
| | LGNAYYKQGDYDEAIEYYQKALELDPN | 135)-X2- |
| | NAEAWYNLGNAYYKQGDYDEAIEYYQK | EEAELAYLLGELAYKLGEYRIAIRAYRIALKRDPNNA |
| | ALELGSGSGSDKENVLQKIYEIMKELE | EAWYNLGNAYYKQGDYDEAIEYYQKALELDPNNAEAW |
| | RLGHAEASMQVSDLIYEFMKTKDENLL | YNLGNAYYKQGDYDEAIEYYQKALELDPNNAEAWYNL |
| | EEAERLLEEVKRGGSGSSGSAWSHPQF | GNAYYKQGDYDEAIEYYQKALEL (SEQ ID NO: |
| | EKGGGSGGGSGGSAWSHPQFEK (SEQ | 590) |
| | ID NO: 372) | |
| 36729.2_ | MEKKIEEAELAYLLGELAYKLGEYRIA | X1- |
| LCB1v2.2_ | IRAYRIALKRDPNNAEAWYNLGNAYYK | DKENVLQKIYEIMKELERLGHAEASMQVSDLIYEFMK |
| 4GS | QGDYDEAIEYYQKALELDPNNAEAWYN | TKDENLLEEAERLLEEVKR (SEQ ID NO: |
| | LGNAYYKQGDYDEAIEYYQKALELDPN | 135)-X2- |
| | NAEAWYNLGNAYYKQGDYDEAIEYYQK | EEAELAYLLGELAYKLGEYRIAIRAYRIALKRDPNNA |
| | ALELGSGSDKENVLQKIYEIMKELERL | EAWYNLGNAYYKQGDYDEAIEYYQKALELDPNNAEAW |
| | GHAEASMQVSDLIYEFMKTKDENLLEE | YNLGNAYYKQGDYDEAIEYYQKALELDPNNAEAWYNL |
| | AERLLEEVKRGGSGSSGSAWSHPQFEK | GNAYYKQGDYDEAIEYYQKALEL (SEQ ID NO: |
| | GGGSGGGSGGSAWSHPQFEK (SEQ | 590) |
| | ID NO: 373) | |
| 36729.2_ | MEKKIEEAELAYLLGELAYKLGEYRIA | X1- |
| LCB1v2.2_ | IRAYRIALKRDPNNAEAWYNLGNAYYK | DKENVLQKIYEIMKELERLGHAEASMQVSDLIYEFMK |
| 2GS | QGDYDEAIEYYQKALELDPNNAEAWYN | TKDENLLEEAERLLEEVKR (SEQ ID NO: |
| | LGNAYYKQGDYDEAIEYYQKALELDPN | 135)-X2- |
| | NAEAWYNLGNAYYKQGDYDEAIEYYQK | EEAELAYLLGELAYKLGEYRIAIRAYRIALKRDPNNA |
| | ALELGSDKENVLOKIYEIMKELERLGH | EAWYNLGNAYYKQGDYDEAIEYYQKALELDPNNAEAW |
| | AEASMQVSDLIYEFMKTKDENLLEEAE | YNLGNAYYKQGDYDEAIEYYQKALELDPNNAEAWYNL |
| | RLLEEVKRGGSGSSGSAWSHPQFEKGG | GNAYYKQGDYDEAIEYYQKALEL (SEQ ID NO: |
| | GSGGGSGGSAWSHPQFEK (SEQ ID | 590) |
| | NO: 374) | |
| LCB3- | MEKKINLDELHMQMTDLVYEALHFAKD | - |
| PAS24- | EEFQKHVFQLFEKATKAYKNKDRQKLE | X1NLDELHMQMTDLVYEALHFAKDEEFQKHVFQLFEK |
| LCB3- | KVVEELKELLERLLSGGASPAAPAPAS | ATKAYKNKDROKLEKVVEELKELLERLLS (SEQ ID |
| 4GS- | PAAPAPSAPAGGNLDELHMQMTDLVYE | NO: 155)-X2- |
| 5L6HC3_1 | ALHFAKDEEFQKHVFQLFEKATKAYKN | NLDELHMQMTDLVYEALHFAKDEEFQKHVFQLFEKAT |
| | KDRQKLEKVVEELKELLERLLSGSGSS | KAYKNKDRQKLEKVVEELKELLERLLS (SEQ ID |
| | EELRAVADLQRLNIELARKLLEAVARL | NO: 155)-X3 |
| | QELNIDLVRKTSELTDEKTIREEIRKV | |
| | KEESKRIVEEAEEEIRRAKEESRKIAD | |
| | ESRGGSGSSGSAWSHPQFEKGGGSGGG | |
| | SGGSAWSHPQFEK (SEQ ID NO: | |
| | 375) | |
| LCB3- | MEKKINLDELHMQMTDLVYEALHFAKD | X1- |
| PAS24- | EEFQKHVFQLFEKATKAYKNKDRQKLE | NLDELHMQMTDLVYEALHFAKDEEFQKHVFQLFEKAT |
| LCB3- | KVVEELKELLERLLSGGASPAAPAPAS | KAYKNKDROKLEKVVEELKELLERLLS (SEQ ID |
| 5GS- | PAAPAPSAPAGGNLDELHMQMTDLVYE | NO: 155)-X2- |
| 5L6HC3_1 | ALHFAKDEEFQKHVFQLFEKATKAYKN | NLDELHMQMTDLVYEALHFAKDEEFQKHVFQLFEKAT |
| | KDRQKLEKVVEELKELLERLLSGSGSG | KAYKNKDROKLEKVVEELKELLERLLS (SEQ ID |
| | SEELRAVADLORLNIELARKLLEAVAR | NO: 155)-X3 |
| | LQELNIDLVRKTSELTDEKTIREEIRK | |
| | VKEESKRIVEEAEEEIRRAKEESRKIA | |
| | DESRGGSGSSGSAWSHPQFEKGGGSGG | |
| | GSGGSAWSHPQFEK (SEQ ID NO: | |
| | 376) | |
| LCB1- | MEKKIDKENVLQKIYEIMKELERLGHA | X1- |
| 10GS- | EASMQVSDLIYEFMKTKDENLLEEAER | DKENVLQKIYEIMKELERLGHAEASMQVSDLIYEFMK |
| AHB2- | LLEEVKRGGGSGGGSGGELEEQVMHVL | TKDENLLEEAERLLEEVKR (SEQ ID NO: |
| 4GS-1rfo | DQVSELAHELLHKLTGEELERAAYFNW | 135)-X2- |
| | WATEMMLELIKSDDEREIREIEEEARR | ELEEQVMHVLDQVSELAHELLHKLTGEELERAAYFNW |
| | ILEHLEELARKGSGSGYIPEAPRDGQA | WATEMMLELIKSDDEREIREIEEEARRILEHLEELAR |
| | YVRKDGEWVLLSTFLGGSGSSGSAWSH | K(SEQ ID NO: 101)-X3- |
| | PQFEKGGGSGGGSGGSAWSHPQFEK | GYIPEAPRDGQAYVRKDGEWVLLSTFL (SEQ ID |
| | (SEQ ID NO: 377) | NO: 179)-X4 |
| LCB1- | MEKKIDKENVLQKIYEIMKELERLGHA | X1- |
| 28GS- | EASMQVSDLIYEFMKTKDENLLEEAER | DKENVLQKIYEIMKELERLGHAEASMQVSDLIYEFMK |
| AHB2- | LLEEVKRGSGSGSGSGSGSGSGSGSGS | TKDENLLEEAERLLEEVKR (SEQ ID NO: |
| 4GS-1rfo | GSGSGSGSELEEQVMHVLDQVSELAHE | 135)-X2- |
| | LLHKLTGEELERAAYFNWWATEMMLEL | ELEEQVMHVLDQVSELAHELLHKLTGEELERAAYFNW |
| | IKSDDEREIREIEEEARRILEHLEELA | WATEMMLELIKSDDEREIREIEEEARRILEHLEELAR |
| | RKGSGSGYIPEAPRDGQAYVRKDGEWV | K(SEQ ID NO: 101)-X3- |
| | LLSTFLGGSGSSGSAWSHPQFEKGGGS | GYIPEAPRDGQAYVRKDGEWVLLSTFL (SEQ ID |
| | GGGSGGSAWSHPQFEK (SEQ ID | NO: 179)-X4 |
| | NO: 378) | |
| LCB3- | MEKKINLDELHMQMTDLVYEALHFAKD | X1- |
| 10GS- | EEFQKHVFQLFEKATKAYKNKDRQKLE | NLDELHMQMTDLVYEALHFAKDEEFQKHVFQLFEKAT |
| AHB2- | KVVEELKELLERLLSGGGSGGGSGGEL | KAYKNKDROKLEKVVEELKELLERLLS (SEQ ID |
| 4GS-1rfo | EEQVMHVLDQVSELAHELLHKLTGEEL | NO: 155)-X2- |
| | ERAAYFNWWATEMMLELIKSDDEREIR | ELEEQVMHVLDQVSELAHELLHKLTGEELERAAYFNW |
| | EIEEEARRILEHLEELARKGSGSGYIP | WATEMMLELIKSDDEREIREIEEEARRILEHLEELAR |
| | EAPRDGQAYVRKDGEWVLLSTFLGGSG | K(SEQ ID NO: 101)-X3- |
| | SSGSAWSHPQFEKGGGSGGGSGGSAWS | GYIPEAPRDGQAYVRKDGEWVLLSTFL (SEQ ID |
| | HPQFEK (SEQ ID NO: 379) | NO: 179)-X4 |
| LCB3- | MEKKINLDELHMQMTDLVYEALHFAKD | X1- |
| 16GS- | EEFQKHVFQLFEKATKAYKNKDRQKLE | NLDELHMQMTDLVYEALHFAKDEEFQKHVFQLFEKAT |
| AHB2- | KVVEELKELLERLLSGSGSGSGSGSGS | KAYKNKDRQKLEKVVEELKELLERLLS (SEQ ID |
| 4GS-1rfo | GSGSELEEQVMHVLDQVSELAHELLHK | NO: 155)-X2- |
| | LTGEELERAAYFNWWATEMMLELIKSD | ELEEQVMHVLDQVSELAHELLHKLTGEELERAAYFNW |
| | DEREIREIEEEARRILEHLEELARKGS | WATEMMLELIKSDDEREIREIEEEARRILEHLEELAR |
| | GSGYIPEAPRDGQAYVRKDGEWVLLST | K (SEQ ID NO: 101)-X3- |
| | FLGGSGSSGSAWSHPQFEKGGGSGGGS | GYIPEAPRDGQAYVRKDGEWVLLSTFL (SEQ ID |
| | GGSAWSHPQFEK (SEQ ID NO: | NO: 179)-X4 |
| | 380) | |
| 36729.2_ | MEKKISAWSHPQFEKGGGSGGGSGGSA | X1- |
| 6GS_LCB1 | WSHPQFEKGGSGSSGMEEAELAYLLGE | DKENVLQKIYEIMKELERLGHAEASMQVSDLIYEFMK |
| v2.2- | LAYKLGEYRIAIRAYRIALKRDPNNAE | TKDENLLEEAERLLEEVKR (SEQ ID NO: |
| 28GS- | AWYNLGNAYYKQGDYDEAIEYYQKALE | 135)-X2- |
| LCB3 | LDPNNAEAWYNLGNAYYKQGDYDEAIE | NLDELHMQMTDLVYEALHFAKDEEFQKHVFQLFEKAT |
| | YYQKALELDPNNAEAWYNLGNAYYKQG | KAYKNKDRQKLEKVVEELKELLERLLS (SEQ ID |
| | DYDEAIEYYQKALELGSGSGSDKENVL | NO: 155) |
| | QKIYEIMKELERLGHAEASMQVSDLIY | |
| | EFMKTKDENLLEEAERLLEEVKRGSGS | |
| | GSGSGSGSGSGSGSGSGSGSGSGSNLD | |
| | ELHMQMTDLVYEALHFAKDEEFQKHVF | |
| | QLFEKATKAYKNKDRQKLEKVVEELKE | |
| | LLERLLS (SEQ ID NO: 381) | |
| 36729.2_ | MEKKISAWSHPQFEKGGGSGGGSGGSA | X1- |
| 6GS_LCB1 | WSHPQFEKGGSGSSGMEEAELAYLLGE | DKENVLQKIYEIMKELERLGHAEASMQVSDLIYEFMK |
| v2.2- | LAYKLGEYRIAIRAYRIALKRDPNNAE | TKDENLLEEAERLLEEVKR (SEQ ID NO: |
| 9GS-LCB3 | AWYNLGNAYYKQGDYDEAIEYYQKALE | 135)-X2- |
| | LDPNNAEAWYNLGNAYYKOGDYDEAIE | NLDELHMQMTDLVYEALHFAKDEEFQKHVFQLFEKAT |
| | YYQKALELDPNNAEAWYNLGNAYYKQG | KAYKNKDRQKLEKVVEELKELLERLLS (SEQ ID |
| | DYDEAIEYYQKALELGSGSGSDKENVL | NO: 155) |
| | QKIYEIMKELERLGHAEASMQVSDLIY | |
| | EFMKTKDENLLEEAERLLEEVKRGSGS | |
| | GSGSGNLDELHMQMTDLVYEALHFAKD | |
| | EEFQKHVFQLFEKATKAYKNKDRQKLE | |
| | KVVEELKELLERLLS (SEQ ID NO: | |
| | 382) | |
| 36729.2_ | MEKKISAWSHPQFEKGGGSGGGSGGSA | X1- |
| 6GS_LCB1 | WSHPQFEKGGSGSSGMEEAELAYLLGE | DKENVLQKIYEIMKELERLGHAEASMQVSDLIYEFMK |
| v2.2- | LAYKLGEYRIAIRAYRIALKRDPNNAE | TKDENLLEEAERLLEEVKR (SEQ ID NO: |
| 28GS- | AWYNLGNAYYKQGDYDEAIEYYQKALE | 135)-X2- |
| AHB2 | LDPNNAEAWYNLGNAYYKQGDYDEAIE | ELEEQVMHVLDQVSELAHELLHKLTGEELERAAYFNW |
| | YYQKALELDPNNAEAWYNLGNAYYKQG | WATEMMLELIKSDDEREIREIEEEARRILEHLEELAR |
| | DYDEAIEYYQKALELGSGSGSDKENVL | K (SEQ ID NO: 101) |
| | QKIYEIMKELERLGHAEASMQVSDLIY | |
| | EFMKTKDENLLEEAERLLEEVKRGSGS | |
| | GSGSGSGSGSGSGSGSGSGSGSGSELE | |
| | EQVMHVLDQVSELAHELLHKLTGEELE | |
| | RAAYFNWWATEMMLELIKSDDEREIRE | |
| | IEEEARRILEHLEELARK (SEQ ID | |
| | NO: 383) | |
| 36729.2_ | MEKKISAWSHPQFEKGGGSGGGSGGSA | X1- |
| 6GS_LCB1 | WSHPQFEKGGSGSSGMEEAELAYLLGE | DKENVLQKIYEIMKELERLGHAEASMQVSDLIYEFMK |
| v2.2- | LAYKLGEYRIAIRAYRIALKRDPNNAE | TKDENLLEEAERLLEEVKR (SEQ ID NO: |
| 9GS-AHB2 | AWYNLGNAYYKQGDYDEAIEYYQKALE | 135)-X2- |
| | LDPNNAEAWYNLGNAYYKQGDYDEAIE | ELEEQVMHVLDQVSELAHELLHKLTGEELERAAYFNW |
| | YYQKALELDPNNAEAWYNLGNAYYKQG | WATEMMLELIKSDDEREIREIEEEARRILEHLEELAR |
| | DYDEAIEYYQKALELGSGSGSDKENVL | K (SEQ ID NO: 101) |
| | QKIYEIMKELERLGHAEASMQVSDLIY | |
| | EFMKTKDENLLEEAERLLEEVKRGSGS | |
| | GSGSGELEEQVMHVLDQVSELAHELLH | |
| | KLTGEELERAAYFNWWATEMMLELIKS | |
| | DDEREIREIEEEARRILEHLEELARK | |
| | (SEQ ID NO: 384) | |
| LCB1- | MEKKIDKENVLQKIYEIMKELERLGHA | X1- |
| 10GS- | EASMQVSDLIYEFMKTKDENLLEEAER | DKENVLQKIYEIMKELERLGHAEASMQVSDLIYEFMK |
| LCB3- | LLEEVKRGGGSGGGSGGNLDELHMQMT | TKDENLLEEAERLLEEVKR (SEQ ID NO: |
| 4GS-1rfo | DLVYEALHFAKDEEFQKHVFQLFEKAT | 135)-X2- |
| | KAYKNKDRQKLEKVVEELKELLERLLS | NLDELHMQMTDLVYEALHFAKDEEFQKHVFQLFEKAT |
| | GSGSGYIPEAPRDGQAYVRKDGEWVLL | KAYKNKDROKLEKVVEELKELLERLLS (SEQ ID |
| | STFLGGSGSSGSAWSHPQFEKGGGSGG | NO: 155)-X3- |
| | GSGGSAWSHPQFEK (SEQ ID NO: | GYIPEAPRDGQAYVRKDGEWVLLSTFL (SEQ ID |
| | 385) | NO: 179)-X4 |
| LCB1- | MEKKIDKENVLQKIYEIMKELERLGHA | X1- |
| 28GS- | EASMQVSDLIYEFMKTKDENLLEEAER | DKENVLQKIYEIMKELERLGHAEASMQVSDLIYEFMK |
| LCB3- | LLEEVKRGSGSGSGSGSGSGSGSGSGS | TKDENLLEEAERLLEEVKR (SEQ ID NO: |
| 4GS-1rfo | GSGSGSGSNLDELHMQMTDLVYEALHF | 135)-X2- |
| | AKDEEFQKHVFQLFEKATKAYKNKDRQ | NLDELHMQMTDLVYEALHFAKDEEFQKHVFQLFEKAT |
| | KLEKVVEELKELLERLLSGSGSGYIPE | KAYKNKDRQKLEKVVEELKELLERLLS (SEQ ID |
| | APRDGQAYVRKDGEWVLLSTFLGGSGS | NO: 155)-X3 |
| | SGSAWSHPQFEKGGGSGGGSGGSAWSH | GYIPEAPRDGQAYVRKDGEWVLLSTFL (SEQ ID |
| | PQFEK (SEQ ID NO: 386) | NO: 179)-X4 |
| AHB2- | MEKKIELEEQVMHVLDQVSELAHELLH | X1- |
| 10GS- | KLTGEELERAAYFNWWATEMMLELIKS | ELEEQVMHVLDQVSELAHELLHKLTGEELERAAYFNW |
| LCB3- | DDEREIREIEEEARRILEHLEELARKG | WATEMMLELIKSDDEREIREIEEEARRILEHLEELAR |
| 4GS-1rfo | GGSGGGSGGNLDELHMQMTDLVYEALH | K (SEQ ID NO: 101)-X2- |
| | FAKDEEFQKHVFQLFEKATKAYKNKDR | NLDELHMQMTDLVYEALHFAKDEEFQKHVFQLFEKAT |
| | QKLEKVVEELKELLERLLSGSGSGYIP | KAYKNKDRQKLEKVVEELKELLERLLS (SEQ ID |
| | EAPRDGQAYVRKDGEWVLLSTFLGGSG | NO: 155)-X3- |
| | SSGSAWSHPQFEKGGGSGGGSGGSAWS | GYIPEAPRDGQAYVRKDGEWVLLSTFL (SEQ ID |
| | HPQFEK (SEQ ID NO: 387) | NO: 179)-X4 |
| AHB2- | MEKKIELEEQVMHVLDQVSELAHELLH | X1- |
| 16GS- | KLTGEELERAAYFNWWATEMMLELIKS | ELEEQVMHVLDQVSELAHELLHKLTGEELERAAYFNW |
| LCB3- | DDEREIREIEEEARRILEHLEELARKG | WATEMMLELIKSDDEREIREIEEEARRILEHLEELAR |
| 4GS-1rfo | SGSGSGSGSGSGSGSNLDELHMQMTDL | K (SEQ ID NO: 101)-X2- |
| | VYEALHFAKDEEFQKHVFQLFEKATKA | NLDELHMQMTDLVYEALHFAKDEEFQKHVFQLFEKAT |
| | YKNKDRQKLEKVVEELKELLERLLSGS | KAYKNKDRQKLEKVVEELKELLERLLS (SEQ ID |
| | GSGYIPEAPRDGQAYVRKDGEWVLLST | NO: 155)-X3- |
| | FLGGSGSSGSAWSHPQFEKGGGSGGGS | GYIPEAPRDGQAYVRKDGEWVLLSTFL (SEQ ID |
| | GGSAWSHPQFEK (SEQ ID NO: | NO: 179)-X4 |
| | 388) | |
| LCB1- | MEKKIDKENVLQKIYEIMKELERLGHA | X1- |
| 9GS- | EASMQVSDLIYEFMKTKDENLLEEAER | DKENVLQKIYEIMKELERLGHAEASMQVSDLIYEFMK |
| LCB3- | LLEEVKRGSGSGSGSGNLDELHMQMTD | TKDENLLEEAERLLEEVKR (SEQ ID NO: |
| 5GS- | LVYEALHFAKDEEFQKHVFQLFEKATK | 135)-X2- |
| 5L6HC3_1 | AYKNKDRQKLEKVVEELKELLERLLSG | NLDELHMQMTDLVYEALHFAKDEEFQKHVFQLFEKAT |
| | SGSGSEELRAVADLQRLNIELARKLLE | KAYKNKDRQKLEKVVEELKELLERLLS (SEQ ID |
| | AVARLQELNIDLVRKTSELTDEKTIRE | NO: 155)-X3 |
| | EIRKVKEESKRIVEEAEEEIRRAKEES | |
| | RKIADESRGGSGSSGSAWSHPQFEKGG | |
| | GSGGGSGGSAWSHPQFEK (SEQ ID | |
| | NO: 389) | |
| AHB2- | MEKKIELEEQVMHVLDQVSELAHELLH | X1- |
| 9GS- | KLTGEELERAAYFNWWATEMMLELIKS | ELEEQVMHVLDQVSELAHELLHKLTGEELERAAYFNW |
| LCB3- | DDEREIREIEEEARRILEHLEELARKG | WATEMMLELIKSDDEREIREIEEEARRILEHLEELAR |
| 5GS- | SGSGSGSGNLDELHMQMTDLVYEALHF | K (SEQ ID NO: 101)-X2- |
| 5L6HC3_1 | AKDEEFQKHVFQLFEKATKAYKNKDRQ | NLDELHMQMTDLVYEALHFAKDEEFQKHVFQLFEKAT |
| | KLEKVVEELKELLERLLSGSGSGSEEL | KAYKNKDROKLEKVVEELKELLERLLS (SEQ ID |
| | RAVADLQRLNIELARKLLEAVARLQEL | NO: 155)-X3 |
| | NIDLVRKTSELTDEKTIREEIRKVKEE | |
| | SKRIVEEAEEEIRRAKEESRKIADESR | |
| | GGSGSSGSAWSHPQFEKGGGSGGGSGG | |
| | SAWSHPQFEK (SEQ ID NO: 390) | |
| AHB2- | MEKKIELEEQVMHVLDQVSELAHELLH | X1- |
| 4GS- | KLTGEELERAAYFNWWATEMMLELIKS | ELEEQVMHVLDQVSELAHELLHKLTGEELERAAYFNW |
| Ina0_int | DDEREIREIEEEARRILEHLEELARKG | WATEMMLELIKSDDEREIREIEEEARRILEHLEELAR |
| 2-R3 | SGSEEAELAYLLGELAYKLGEYRIAIR | K (SEQ ID NO: 101)-X2- |
| | AYRIALKRDPNNAEAWYNLGNAYYKQG | EEAELAYLLGELAYKLGEYRIAIRAYRIALKRDPNNA |
| | DYDEAIYYQKALELDPNNAEAKQNLGN | EAWYNLGNAYYKQGDYDEAIYYQKALELDPNNAEAKQ |
| | AKQKQGGGSGSSGSAWSHPQFEKGGGS | NLGNAKQKQ (SEQ ID NO: 591) |
| | GGGSGGSAWSHPQFEK (SEQ ID NO: | |
| | 391) | |
| AHB2- | MEKKIELEEQVMHVLDQVSELAHELLH | X1- |
| 6GS- | KLTGEELERAAYFNWWATEMMLELIKS | ELEEQVMHVLDQVSELAHELLHKLTGEELERAAYFNW |
| Ina0_int | DDEREIREIEEEARRILEHLEELARKG | WATEMMLELIKSDDEREIREIEEEARRILEHLEELAR |
| 2-R3 | SGSGSEEAELAYLLGELAYKLGEYRIA | K (SEQ ID NO: 101)-X2- |
| | IRAYRIALKRDPNNAEAWYNLGNAYYK | EEAELAYLLGELAYKLGEYRIAIRAYRIALKRDPNNA |
| | QGDYDEIEYYQKALELDPNNAEAKQNL | EAWYNLGNAYYKQGDYDEIEYYQKALELDPNNAEAKQ |
| | GNAKQKQGGGSGSSGSAWSHPQFEKGG | NLGNAKQKQ (SEQ ID NO: _592) |
| | GSGGGSGGSAWSHPQFEK (SEQ ID | |
| | NO: 392) | |
| AHB2- | MEKKIELEEQVMHVLDQVSELAHELLH | X1- |
| 4GS- | KLTGEELERAAYFNWWATEMMLELIKS | ELEEQVMHVLDQVSELAHELLHKLTGEELERAAYFNW |
| 1na0_int2 | DDEREIREIEEEARRILEHLEELARKG | WATEMMLELIKSDDEREIREIEEEARRILEHLEELAR |
| | SGSEEAELAYLLGELAYKLGEYRIAIR | K (SEQ ID NO: 101)-X2- |
| | AYRIALKRDPNNAEAWYNLGNAYYKQG | EEAELAYLLGELAYKLGEYRIAIRAYRIALKRDPNNA |
| | DYDEAIYYQKALELDPNNAEAWYNLGN | EAWYNLGNAYYKQGDYDEAIYYQKALELDPNNAEAWY |
| | AYYKQGDYDEAIEYYQKALELDPNNAE | NLGNAYYKQGDYDEAIEYYQKALELDPNNAEAKQNLG |
| | AKONLGNKOKQGGGSGSSGSAWSHPQF | NKQKQ (SEQ ID NO: 593) |
| | EKGGGSGGGSGGSAWSHPQFEK (SEQ | |
| | ID NO: 393) | |
| AHB2- | MEKKIELEEQVMHVLDQVSELAHELLH | X1- |
| 6GS- | KLTGEELERAAYFNWWATEMMLELIKS | ELEEQVMHVLDQVSELAHELLHKLTGEELERAAYFNW |
| 1na0_int2 | DDEREIREIEEEARRILEHLEELARKG | WATEMMLELIKSDDEREIREIEEEARRILEHLEELAR |
| | SGSGSEEAELAYLLGELAYKLGEYRIA | K (SEQ ID NO: 101)-X2- |
| | IRAYRIALKRDPNNAEAWYNLGNAYYK | EEAELAYLLGELAYKLGEYRIAIRAYRIALKRDPNNA |
| | QGDYDEAIYYQKALELDPNNAEAWYNL | EAWYNLGNAYYKQGDYDEAIYYQKALELDPNNAEAWY |
| | GNAYYKQGDYDEAIEYYQKALELDPNN | NLGNAYYKQGDYDEAIEYYQKALELDPNNAEAKQNLG |
| | AEAKQNLGNKOKQGGGSGSSGSAWSHP | NKQKQ (SEQ ID NO: 593) |
| | QFEKGGGSGGGSGGSAWSHPQFEK | |
| | (SEQ ID NO: 394) | |
| AHB2- | MEKKIELEEQVMHVLDQVSELAHELLH | X1- |
| 4GS-6msr | KLTGEELERAAYFNWWATEMMLELIKS | ELEEQVMHVLDQVSELAHELLHKLTGEELERAAYFNW |
| | DDEREIREIEEEARRILEHLEELARKG | WATEMMLELIKSDDEREIREIEEEARRILEHLEELAR |
| | SGSGSEYEIRKALEELKASTAELKRAT | K (SEQ ID NO: 101)-X2- |
| | ASLRASTEELKKNPSEDALVENNRLIV | EYEIRKALEELKASTAELKRATASLRASTEELKKMPS |
| | EHNAIIVENRIIAAVLELIVRAIKGGS | EDALVENMRLIVEHNAIIVENRIIAAVLELIVRAIK |
| | GSSGSAWSHPQFEKGGGSGGGSGGSAW | (SEQ ID NO: 594) |
| | SHPQFEK (SEQ ID NO: 395) | |
| AHB2- | MEKKIELEEQVMHVLDQVSELAHELLH | X1- |
| 6GS-6msr | KLTGEELERAAYFNWWATEMMLELIKS | ELEEQVMHVLDQVSELAHELLHKLTGEELERAAYFNW |
| | DDEREIREIEEEARRILEHLEELARKG | WATEMMLELIKSDDEREIREIEEEARRILEHLEELAR |
| | SGSGSGSEYEIRKALEELKASTAELKR | K (SEQ ID NO: 101)-X2- |
| | ATASLRASTEELKKNPSEDALVENNRL | EYEIRKALEELKASTAELKRATASLRASTEELKKMPS |
| | IVEHNAIIVENRIIAAVLELIVRAIKG | EDALVENMRLIVEHNAIIVENRIIAAVLELIVRAIK |
| | GSGSSGSAWSHPQFEKGGGSGGGSGGS | (SEQ ID NO: 594) |
| | AWSHPQFEK (SEQ ID NO: 396) | |
| 36729.2_ | MEKKISAWSHPQFEKGGGSGGGSGGSA | X1- |
| LCB1v2.2_ | WSHPQFEKGGSGSSGEEAELAYLLGEL | EEAELAYLLGELAYKLGEYRIAIRAYRIALKRDPNNA |
| 6GS | AYKLGEYRIAIRAYRIALKRDPNNAEA | EAWYNLGNAYYKQGDYDEAIEYYQKALELDPNNAEAW |
| | WYNLGNAYYKQGDYDEAIEYYQKALEL | YNLGNAYYKQGDYDEAIEYYQKALELDPNNAEAWYNL |
| | DPNNAEAWYNLGNAYYKQGDYDEAIEY | GNAYYKQGDYDEAIEYYQKALEL (SEQ ID NO: |
| | YQKALELDPNNAEAWYNLGNAYYKQGD | 590)-X2- |
| | YDEAIEYYQKALELGSGSGSDKENVLQ | DKENVLQKIYEIMKELERLGHAEASMQVSDLIYEFMK |
| | KIYEIMKELERLGHAEASMQVSDLIYE | TKDENLLEEAERLLEEVKR (SEQ ID NO: 135) |
| | FMKTKDENLLEEAERLLEEVKR (SEQ | |
| | ID NO: 397) | |
| 36729.2_ | MEKKISAWSHPQFEKGGGSGGGSGGSA | X1- |
| LCB1v2.2_ | WSHPQFEKGGSGSSGEEAELAYLLGEL | EEAELAYLLGELAYKLGEYRIAIRAYRIALKRDPNNA |
| 4GS | AYKLGEYRIAIRAYRIALKRDPNNAEA | EAWYNLGNAYYKQGDYDEAIEYYQKALELDPNNAEAW |
| | WYNLGNAYYKQGDYDEAIEYYQKALEL | YNLGNAYYKQGDYDEAIEYYQKALELDPNNAEAWYNL |
| | DPNNAEAWYNLGNAYYKQGDYDEAIEY | GNAYYKQGDYDEAIEYYQKALEL (SEQ ID NO: |
| | YQKALELDPNNAEAWYNLGNAYYKQGD | 590)-X2- |
| | YDEAIEYYQKALELGSGSDKENVLQKI | DKENVLQKIYEIMKELERLGHAEASMQVSDLIYEFMK |
| | YEIMKELERLGHAEASMQVSDLIYEFM | TKDENLLEEAERLLEEVKR (SEQ ID NO: 135) |
| | KTKDENLLEEAERLLEEVKR (SEQ | |
| | ID NO: 398) | |
| 36729.2_ | MEKKISAWSHPQFEKGGGSGGGSGGSA | X1- |
| LCB1v2.2_ | WSHPQFEKGGSGSSGEEAELAYLLGEL | EEAELAYLLGELAYKLGEYRIAIRAYRIALKRDPNNA |
| 2GS | AYKLGEYRIAIRAYRIALKRDPNNAEA | EAWYNLGNAYYKQGDYDEAIEYYQKALELDPNNAEAW |
| | WYNLGNAYYKOGDYDEAIEYYQKALEL | YNLGNAYYKQGDYDEAIEYYQKALELDPNNAEAWYNL |
| | DPNNAEAWYNLGNAYYKQGDYDEAIEY | GNAYYKQGDYDEAIEYYQKALEL (SEQ ID NO: |
| | YQKALELDPNNAEAWYNLGNAYYKQGD | 590)-X2- |
| | YDEAIEYYQKALELGSDKENVLQKIYE | DKENVLQKIYEIMKELERLGHAEASMQVSDLIYEFMK |
| | IMKELERLGHAEASMQVSDLIYEFMKT | TKDENLLEEAERLLEEVKR(SEQ ID NO: 135) |
| | KDENLLEEAERLLEEVKR (SEQ ID | |
| | NO: 399) | |
| AHB2- | MEKKIELEEQVMHVLDQVSELAHELLH | X1- |
| 8GS- | KLTGEELERAAYFNWWATEMMLELIKS | ELEEQVMHVLDQVSELAHELLHKLTGEELERAAYFNW |
| 1na0_int2- | DDEREIREIEEEARRILEHLEELARKG | WATEMMLELIKSDDEREIREIEEEARRILEHLEELAR |
| R3 | SGSGSGSEEAELAYLLGELAYKLGEYR | K (SEQ ID NO: 101)-X2- |
| | IAIRAYRIALKRDPNNAEAWYNLGNAY | EEAELAYLLGELAYKLGEYRIAIRAYRIALKRDPNNA |
| | YKQGDYDEAIEYYQKALELDPNNAEAK | EAWYNLGNAYYKQGDYDEAIEYYQKALELDPNNAEAK |
| | QNLGNAKQKQGGGSGSSGSAWSHPQFE | QNLGNAKQKQG (SEQ ID NO: 180)-X3 |
| | KGGGSGGGSGGSAWSHPQFEK (SEQ | |
| | ID NO: 400) | |
| AHB2- | MEKKIELEEQVMHVLDQVSELAHELLH | X1- |
| 8GS- | KLTGEELERAAYFNWWATEMMLELIKS | ELEEQVMHVLDQVSELAHELLHKLTGEELERAAYFNW |
| 1na0_int2 | DDEREIREIEEEARRILEHLEELARKG | WATEMMLELIKSDDEREIREIEEEARRILEHLEELAR |
| | SGSGSGSEEAELAYLLGELAYKLGEYR | K (SEQ ID NO: 101) -X2- |
| | IAIRAYRIALKRDPNNAEAWYNLGNAY | EEAELAYLLGELAYKLGEYRIAIRAYRIALKRDPNNA |
| | YKQGDYDEAIEYYQKALELDPNNAEAW | EAWYNLGNAYYKQGDYDEAIEYYQKALELDPNNAEAW |
| | YNLGNAYYKQGDYDEAIEYYQKALELD | YNLGNAYYKQGDYDEAIEYYQKALELDPNNAEAKQNL |
| | PNNAEAKQNLGNAKQKQGGGSGSSGSA | GNAKQKQG (SEQ ID NO: 181) -X3 |
| | WSHPQFEKGGGSGGGSGGSAWSHPQFE | |
| | K (SEQ ID NO: 401) | |
| AHB2- | MEKKIELEEQVMHVLDQVSELAHELLH | X1- |
| 8GS-6msr | KLTGEELERAAYFNWWATEMMLELIKS | ELEEQVMHVLDQVSELAHELLHKLTGEELERAAYFNW |
| | DDEREIREIEEEARRILEHLEELARKG | WATEMMLELIKSDDEREIREIEEEARRILEHLEELAR |
| | SGSGSGSGSEYEIRKALEELKASTAEL | K (SEQ ID NO: 101)-X2- |
| | KRATAS LRASTEELKKNPSEDALVENN | GSEYEIRKALEELKASTAELKRATASLRASTEELKKN |
| | RLIVEHNAIIVENNRIIAAVLELIVRA | PSEDALVENNRLIVEHNAIIVENNRIIAAVLELIVRA |
| | IKGGSGSSGSAWSHPQFEKGGGSGGGS | IK (SEQ ID NO: 182)-X3 |
| | GGSAWSHPQFEK (SEQ ID NO: | |
| | 402) | |
| AHB2- | MEKKIELEEQVMHVLDQVSELAHELLH | X1- |
| 10GS- | KLTGEELERAAYFNWWATEMMLELIKS | ELEEQVMHVLDQVSELAHELLHKLTGEELERAAYFNW |
| 6msr | DDEREIREIEEEARRILEHLEELARKG | WATEMMLELIKSDDEREIREIEEEARRILEHLEELAR |
| | SGSGSGSGSGSEYEIRKALEELKASTA | K(SEQ ID NO: 101) -X2- |
| | ELKRATASLRASTEELKKNPSEDALVE | GSEYEIRKALEELKASTAELKRATASLRASTEELKKN |
| | NNRLIVEHNAIIVENNRIIAAVLELIV | PSEDALVENNRLIVEHNAIIVENNRIIAAVLELIVRA |
| | RAIKGGSGSSGSAWSHPQFEKGGGSGG | IK(SEQ ID NO: 182)-X3 |
| | GSGGSAWSHPQFEK (SEQ ID NO: | |
| | 403) | |
| AHB2- | MEKKIELEEQVMHVLDQVSELAHELLH | X1- |
| 10GS- | KLTGEELERAAYFNWWATEMMLELIKS | ELEEQVMHVLDQVSELAHELLHKLTGEELERAAYFNW |
| 1na0_int2-R3 | DDEREIREIEEEARRILEHLEELARKG | WATEMMLELIKSDDEREIREIEEEARRILEHLEELAR |
| | SGSGSGSGSEEAELAYLLGELAYKLGE | K (SEQ ID NO: 101)-X2- |
| | YRIAIRAYRIALKRDPNNAEAWYNLGN | EEAELAYLLGELAYKLGEYRIAIRAYRIALKRDPNNA |
| | AYYKQGDYDEAIEYYQKALELDPNNAE | EAWYNLGNAYYKQGDYDEAIEYYQKALELDPNNAEAK |
| | AKONLGNAKQKQGGGSGSSGSAWSHPQ | QNLGNAKQKQG (SEQ ID NO: 180)-X3 |
| | FEKGGGSGGGSGGSAWSHPQFEK | |
| | (SEQ ID NO: 404) | |
| AHB2- | MEKKIELEEQVMHVLDQVSELAHELLH | X1- |
| 10GS- | KLTGEELERAAYFNWWATEMMLELIKS | ELEEQVMHVLDQVSELAHELLHKLTGEELERAAYFNW |
| 1na0_int2 | DDEREIREIEEEARRILEHLEELARKG | WATEMMLELIKSDDEREIREIEEEARRILEHLEELAR |
| | SGSGSGSGSEEAELAYLLGELAYKLGE | K (SEQ ID NO: 101)-X2- |
| | YRIAIRAYRIALKRDPNNAEAWYNLGN | EEAELAYLLGELAYKLGEYRIAIRAYRIALKRDPNNA |
| | AYYKQGDYDEAIEYYQKALELDPNNAE | EAWYNLGNAYYKQGDYDEAIEYYQKALELDPNNAEAW |
| | AWYNLGNAYYKQGDYDEAIEYYQKALE | YNLGNAYYKQGDYDEAIEYYQKALELDPNNAEAKQNL |
| | LDPNNAEAKQNLGNAKQKQGGGSGSSG | GNAKQKQG (SEQ ID NO: 181)-X3 |
| | SAWSHPQFEKGGGSGGGSGGSAWSHPQ | |
| | FEK (SEQ ID NO: 405) | |
| AHB2- | MEKKIELEEQVMHVLDQVSELAHELLH | X1- |
| 4GS-1gcm | KLTGEELERAAYFNWWATEMMLELIKS | ELEEQVMHVLDQVSELAHELLHKLTGEELERAAYFNW |
| | DDEREIREIEEEARRILEHLEELARKG | WATEMMLELIKSDDEREIREIEEEARRILEHLEELAR |
| | SGSRMKQIEDKIEEILSKIYHIENEIA | K (SEQ ID NO: 101)-X2- |
| | RIKKLIGERGGSGSSGSAWSHPQFEKG | RMKQIEDKIEEILSKIYHIENEIARIKKLIGER |
| | GGSGGGSGGSAWSHPQFEK (SEQ ID | (SEQ ID NO: 183)-X3 |
| | NO: 406) | |
| AHB2- | MEKKIELEEQVMHVLDQVSELAHELLH | X1- |
| 8GS-1gcm | KLTGEELERAAYFNWWATEMMLELIKS | ELEEQVMHVLDQVSELAHELLHKLTGEELERAAYFNW |
| | DDEREIREIEEEARRILEHLEELARKG | WATEMMLELIKSDDEREIREIEEEARRILEHLEELAR |
| | SGSGSGSRMKQIEDKIEEILSKIYHIE | K (SEQ ID NO: 101)-X2- |
| | NEIARIKKLIGERGGSGSSGSAWSHPQ | RMKQIEDKIEEILSKIYHIENEIARIKKLIGER (SEQ |
| | FEKGGGSGGGSGGSAWSHPQFEK | ID NO: 183)-X3 |
| | (SEQ ID NO: 407) | |
| AHB2- | MEKKIELEEQVMHVLDQVSELAHELLH | X1- |
| 4GS-pRO- | KLTGEELERAAYFNWWATEMMLELIKS | ELEEQVMHVLDQVSELAHELLHKLTGEELERAAYFNW |
| 2-noHis | DDEREIREIEEEARRILEHLEELARKG | WATEMMLELIKSDDEREIREIEEEARRILEHLEELAR |
| | SGSGSEYEIRKALEELKASTAELKRST | K (SEQ ID NO: 101)-X2- |
| | ASLRASTEELKKNPSEDALVENNRLIV | GSEYEIRKALEELKASTAELKRSTASLRASTEELKKN |
| | ENNAIIVENNRIIAAVLELIVRAIKGG | PSEDALVENNRLIVENNAIIVENNRIIAAVLELIVRA |
| | SGSSGSAWSHPQFEKGGGSGGGSGGSA | IK (SEQ ID NO: 184)-X3 |
| | WSHPQFEK (SEQ ID NO: 408) | |
| AHB2- | MEKKIELEEQVMHVLDQVSELAHELLH | X1ELEEQVMHVLDQVSELAHELLHKLTGEELERAAYF |
| 8GS-PRO- | KLTGEELERAAYFNWWATEMMLELIKS | NWWATEMMLELIKSDDEREIREIEEEARRILEHLEEL |
| 2-noHis | DDEREIREIEEEARRILEHLEELARKG | ARK (SEQ ID NO: 101)-X2- |
| | SGSGSGSGSEYEIRKALEELKASTAEL | GSEYEIRKALEELKASTAELKRSTASLRASTEELKKN |
| | KRSTASLRASTEELKKNPSEDALVENN | PSEDALVENNRLIVENNAIIVENNRIIAAVLELIVRA |
| | RLIVENNAIIVENNRIIAAVLELIVRA | IK (SEQ ID NO: 184)-X3 |
| | IKGGSGSSGSAWSHPQFEKGGGSGGGS | |
| | GGSAWSHPQFEK (SEQ ID NO: | |
| | 409) | |
| AHB2- | MEKKIELEEQVMHVLDQVSELAHELLH | X1- |
| 6GS- | KLTGEELERAAYFNWWATEMMLELIKS | ELEEQVMHVLDQVSELAHELLHKLTGEELERAAYFNW |
| 1na0_3 | DDEREIREIEEEARRILEHLEELARKG | WATEMMLELIKSDDEREIREIEEEARRILEHLEELAR |
| | SGSGSNLAEKMYKAGNAMYRKGQYTIA | K (SEQ ID NO: 101)-X2- |
| | IIAYTLALLKDPNNAEAWYNLGNAAYK | NLAEKMYKAGNAMYRKGQYTIAIIAYTLALLKDPNNA |
| | KGEYDEAIEAYQKALELDPNNAEAWYN | EAWYNLGNAAYKKGEYDEAI EAYQKALELDPNNAEAW |
| | LGNAYYKQGDYDEAIEYYQKALELDPN | YNLGNAYYKQGDYDEAIEYYQKALELDPNNAEAKQNL |
| | NAEAKONLGNAKQKOGGGSGSSGSAWS | GNAKQKQG (SEQ ID NO: 185)-X3 |
| | HPQFEKGGGSGGGSGGSAWSHPQFEK | |
| | (SEQ ID NO: 410) | |
| AHB2- | MEKKIELEEQVMHVLDQVSELAHELLH | X1- |
| 10GS- | KLTGEELERAAYFNWWATEMMLELIKS | ELEEQVMHVLDQVSELAHELLHKLTGEELERAAYFNW |
| 1na0_3 | DDEREIREIEEEARRILEHLEELARKG | WATEMMLELIKSDDEREIREIEEEARRILEHLEELAR |
| | SGSGSGSGSNLAEKMYKAGNAMYRKGQ | K (SEQ ID NO: 101)-X2- |
| | YTIAIIAYTLALLKDPNNAEAWYNLGN | NLAEKMYKAGNAMYRKGQYTIAIIAYTLALLKDPNNA |
| | AAYKKGEYDEAIEAYQKALELDPNNAE | EAWYNLGNAAYKKGEYDEAI EAYQKALELDPNNAEAW |
| | AWYNLGNAYYKQGDYDEAIEYYQKALE | YNLGNAYYKQGDYDEAIEYYQKALELDPNNAEAKQNL |
| | LDPNNAEAKQNLGNAKQKQGGGSGSSG | GNAKQKQG (SEQ ID NO: 185)-X3 |
| | SAWSHPQFEKGGGSGGGSGGSAWSHPQ | |
| | FEK (SEQ ID NO: 411) | |
| AHB2- | MEKKIELEEQVMHVLDQVSELAHELLH | X1- |
| 6GS-4pn9 | KLTGEELERAAYFNWWATEMMLELIKS | ELEEQVMHVLDQVSELAHELLHKLTGEELERAAYFNW |
| | DDEREIREIEEEARRILEHLEELARKG | WATEMMLELIKSDDEREIREIEEEARRILEHLEELAR |
| | SGSGSGEIAKSLKEIAKSLKEIAWSLK | K (SEQ ID NO: 101)-X2- |
| | EIAKSLKGGGSGSSGSAWSHPQFEKGG | GEIAKSLKEIAKSLKEIAWSLKEIAKSLKG (SEQ ID |
| | GSGGGSGGSAWSHPQFEK (SEQ ID | NO: 186)-X3 |
| | NO: 412) | |
| AHB2- | MEKKIELEEQVMHVLDQVSELAHELLH | X1- |
| 10GS- | KLTGEELERAAYFNWWATEMMLELIKS | ELEEQVMHVLDQVSELAHELLHKLTGEELERAAYFNW |
| 4pn9 | DDEREIREIEEEARRILEHLEELARKG | WATEMMLELIKSDDEREIREIEEEARRILEHLEELAR |
| | SGSGSGSGSGEIAKSLKEIAKSLKEIA | K (SEQ ID NO: 101)-X2- |
| | WSLKEIAKSLKGGGSGSSGSAWSHPQF | GEIAKSLKEIAKSLKEIAWSLKEIAKSLKG (SEQ ID |
| | EKGGGSGGGSGGSAWSHPQFEK (SEQ | NO: 186)-X3 |
| | ID NO: 413) | |
| AHB2- | MEKKIELEEQVMHVLDQVSELAHELLH | X1- |
| GGGGS5- | KLTGEELERAAYFNWWATEMMLELIKS | ELEEQVMHVLDQVSELAHELLHKLTGEELERAAYFNW |
| 1na0_int2- | DDEREIREIEEEARRILEHLEELARKG | WATEMMLELIKSDDEREIREIEEEARRILEHLEELAR |
| R3 | GSGGEEAELAYLLGELAYKLGEYRIAI | K (SEQ ID NO: 101)-X2- |
| | RAYRIALKRDPNNAEAWYNLGNAYYKQ | EEAELAYLLGELAYKLGEYRIAIRAYRIALKRDPNNA |
| | GDYDEAIEYYQKALELDPNNAEAKQNL | EAWYNLGNAYYKQGDYDEAIEYYQKALELDPNNAEAK |
| | GNAKOKQGGGSGSSGSAWSHPQFEKGG | QNLGNAKQKQG (SEQ ID NO: 180)-X3 |
| | GSGGGSGGSAWSHPQFEK (SEQ ID | |
| | NO: 414) | |
| AHB2- | MEKKIELEEQVMHVLDQVSELAHELLH | X1- |
| GGGGS7- | KLTGEELERAAYFNWWATEMMLELIKS | ELEEQVMHVLDQVSELAHELLHKLTGEELERAAYFNW |
| 1na0_int2- | DDEREIREIEEEARRILEHLEELARKG | WATEMMLELIKSDDEREIREIEEEARRILEHLEELAR |
| R3 | GGSGGGEEAELAYLLGELAYKLGEYRI | K (SEQ ID NO: 101)-X2- |
| | AIRAYRIALKRDPNNAEAWYNLGNAYY | EEAELAYLLGELAYKLGEYRIAIRAYRIALKRDPNNA |
| | KQGDYDEAIEYYQKALELDPNNAEAKQ | EAWYNLGNAYYKQGDYDEAIEYYQKALELDPNNAEAK |
| | NLGNAKQKQGGGSGSSGSAWSHPQFEK | QNLGNAKQKQG (SEQ ID NO: 180)-X3 |
| | GGGSGGGSGGSAWSHPQFEK (SEQ ID | |
| | NO: 415) | |
| AHB2- | MEKKIELEEQVMHVLDQVSELAHELLH | X1- |
| GGGGS9- | KLTGEELERAAYFNWWATEMMLELIKS | ELEEQVMHVLDQVSELAHELLHKLTGEELERAAYFNW |
| 1na0_int2- | DDEREIREIEEEARRILEHLEELARKG | WATEMMLELIKSDDEREIREIEEEARRILEHLEELAR |
| R3 | GGGSGGGGEEAELAYLLGELAYKLGEY | K (SEQ ID NO: 101)-X2- |
| | RIAIRAYRIALKRDPNNAEAWYNLGNA | EEAELAYLLGELAYKLGEYRIAIRAYRIALKRDPNNA |
| | YYKQGDYDEAIEYYQKALELDPNNAEA | EAWYNLGNAYYKQGDYDEAIEYYQKALELDPNNAEAK |
| | KQNLGNAKQKQGGGSGSSGSAWSHPQF | QNLGNAKQKQG (SEQ ID NO: 180)-X3 |
| | EKGGGSGGGSGGSAWSHPQFEK (SEQ | |
| | ID NO: 416) | |
| AHB2- | MEKKIELEEQVMHVLDQVSELAHELLH | X1- |
| GGGGS5- | KLTGEELERAAYFNWWATEMMLELIKS | ELEEQVMHVLDQVSELAHELLHKLTGEELERAAYFNW |
| 1na0_int2 | DDEREIREIEEEARRILEHLEELARKG | WATEMMLELIKSDDEREIREIEEEARRILEHLEELAR |
| | GSGGEEAELAYLLGELAYKLGEYRIAI | K (SEQ ID NO: 101)-X2- |
| | RAYRIALKRDPNNAEAWYNLGNAYYKQ | EEAELAYLLGELAYKLGEYRIAIRAYRIALKRDPNNA |
| | GDYDEAIEYYQKALELDPNNAEAWYNL | EAWYNLGNAYYKQGDYDEAIEYYQKALELDPNNAEAW |
| | GNAYYKQGDYDEAIEYYQKALELDPNN | YNLGNAYYKQGDYDEAIEYYQKALELDPNNAEAKQNL |
| | AEAKQNLGNAKQKQGGGSGSSGSAWSH | GNAKQKQG (SEQ ID NO: 181)-X3 |
| | PQFEKGGGSGGGSGGSAWSHPQFEK | |
| | (SEQ ID NO: 417) | |
| AHB2- | MEKKIELEEQVMHVLDQVSELAHELLH | X1- |
| GGGGS7- | KLTGEELERAAYFNWWATEMMLELIKS | ELEEQVMHVLDQVSELAHELLHKLTGEELERAAYFNW |
| 1na0_int2 | DDEREIREIEEEARRILEHLEELARKG | WATEMMLELIKSDDEREIREIEEEARRILEHLEELAR |
| | GGSGGGEEAELAYLLGELAYKLGEYRI | K (SEQ ID NO: 101)-X2- |
| | AIRAYRIALKRDPNNAEAWYNLGNAYY | EEAELAYLLGELAYKLGEYRIAIRAYRIALKRDPNNA |
| | KQGDYDEAIEYYQKALELDPNNAEAWY | EAWYNLGNAYYKQGDYDEAIEYYQKALELDPNNAEAW |
| | NLGNAYYKQGDYDEAIEYYQKALELDP | YNLGNAYYKQGDYDEAIEYYQKALELDPNNAEAKQNL |
| | NNAEAKQNLGNAKQKQGGGSGSSGSAW | GNAKQKOG (SEQ ID NO: 181)-X3 |
| | SHPQFEKGGGSGGGSGGSAWSHPQFEK | |
| | (SEQ ID NO: 418) | |
| AHB2- | MEKKIELEEQVMHVLDQVSELAHELLH | X1- |
| GGGGS9- | KLTGEELERAAYFNWWATEMMLELIKS | ELEEQVMHVLDQVSELAHELLHKLTGEELERAAYFNW |
| 1na0_int2 | DDEREIREIEEEARRILEHLEELARKG | WATEMMLELIKSDDEREIREIEEEARRILEHLEELAR |
| | GGGSGGGGEEAELAYLLGELAYKLGEY | K (SEQ ID NO: 101)-X2- |
| | RIAIRAYRIALKRDPNNAEAWYNLGNA | EEAELAYLLGELAYKLGEYRIAIRAYRIALKRDPNNA |
| | YYKQGDYDEAIEYYQKALELDPNNAEA | EAWYNLGNAYYKQGDYDEAIEYYQKALELDPNNAEAW |
| | WYNLGNAYYKQGDYDEAIEYYQKALEL | YNLGNAYYKQGDYDEAIEYYQKALELDPNNAEAKQNL |
| | DPNNAEAKQNLGNAKQKQGGGSGSSGS | GNAKQKQG (SEQ ID NO: 181)-X3 |
| | AWSHPQFEKGGGSGGGSGGSAWSHPQF | |
| | EK (SEQ ID NO: 419) | |
| AHB2- | MEKKIELEEQVMHVLDQVSELAHELLH | X1- |
| GGGGS5- | KLTGEELERAAYFNWWATEMMLELIKS | ELEEQVMHVLDQVSELAHELLHKLTGEELERAAYFNW |
| 6msr | DDEREIREIEEEARRILEHLEELARKG | WATEMMLELIKSDDEREIREIEEEARRILEHLEELAR |
| | GSGGGSEYEIRKALEELKASTAELKRA | K (SEQ ID NO: 101)-X2- |
| | TASLRASTEELKKNPSEDALVENNRLI | GSEYEIRKALEELKASTAELKRATASLRASTEELKKN |
| | VEHNAIIVENNRIIAAVLELIVRAIKG | PSEDALVENNRLIVEHNAIIVENNRIIAAVLELIVRA |
| | GSGSSGSAWSHPQFEKGGGSGGGSGGS | IK (SEQ ID NO: 182)-X3 |
| | AWSHPQFEK (SEQ ID NO: 420) | |
| AHB2- | MEKKIELEEQVMHVLDQVSELAHELLH | X1- |
| GGGGS7- | KLTGEELERAAYFNWWATEMMLELIKS | ELEEQVMHVLDQVSELAHELLHKLTGEELERAAYFNW |
| 6msr | DDEREIREIEEEARRILEHLEELARKG | WATEMMLELIKSDDEREIREIEEEARRILEHLEELAR |
| | GGSGGGGSEYEIRKALEELKASTAELK | K (SEQ ID NO: 101)-X2- |
| | RATASLRASTEELKKNPSEDALVENNR | GSEYEIRKALEELKASTAELKRATASLRASTEELKKN |
| | LIVEHNAIIVENNRIIAAVLELIVRAI | PSEDALVENNRLIVEHNAIIVENNRIIAAVLELIVRA |
| | KGGSGSSGSAWSHPQFEKGGGSGGGSG | IK (SEQ ID NO: 182)-X3 |
| | GSAWSHPQFEK (SEQ ID NO: 421) | |
| AHB2- | MEKKIELEEQVMHVLDQVSELAHELLH | X1- |
| GGGGS9- | KLTGEELERAAYFNWWATEMMLELIKS | ELEEQVMHVLDQVSELAHELLHKLTGEELERAAYFNW |
| 6msr | DDEREIREIEEEARRILEHLEELARKG | WATEMMLELIKSDDEREIREIEEEARRILEHLEELAR |
| | GGGSGGGGGSEYEIRKALEELKASTAE | K (SEQ ID NO: 101)-X2- |
| | LKRATASLRASTEELKKNPSEDALVEN | GSEYEIRKALEELKASTAELKRATASLRASTEELKKN |
| | NRLIVEHNAIIVENNRIIAAVLELIVR | PSEDALVENNRLIVEHNAIIVENNRIIAAVLELIVRA |
| | AIKGGSGSSGSAWSHPQFEKGGGSGGG | IK (SEQ ID NO: 182)-X3 |
| | SGGSAWSHPQFEK (SEQ ID NO: | |
| | 422) | |
| AHB2- | MEKKIELEEQVMHVLDQVSELAHELLH | X1- |
| GGGGS5- | KLTGEELERAAYFNWWATEMMLELIKS | ELEEQVMHVLDQVSELAHELLHKLTGEELERAAYFNW |
| 1gcm | DDEREIREIEEEARRILEHLEELARKG | WATEMMLELIKSDDEREIREIEEEARRILEHLEELAR |
| | GSGGRMKQIEDKIEEILSKIYHIENEI | K (SEQ ID NO: 101)-X2- |
| | ARIKKLIGERGGSGSSGSAWSHPQFEK | RMKQIEDKIEEILSKIYHIENEIARIKKLIGER (SEQ |
| | GGGSGGGSGGSAWSHPQFEK (SEQ | ID NO: 183)-X3 |
| | ID NO: 423) | |
| AHB2- | MEKKIELEEQVMHVLDQVSELAHELLH | X1- |
| GGGGS7- | KLTGEELERAAYFNWWATEMMLELIKS | ELEEQVMHVLDQVSELAHELLHKLTGEELERAAYFNW |
| 1gcm | DDEREIREIEEEARRILEHLEELARKG | WATEMMLELIKSDDEREIREIEEEARRILEHLEELAR |
| | GGSGGGRMKQIEDKIEEILSKIYHIEN | K (SEQ ID NO: 101)-X2- |
| | EIARIKKLIGERGGSGSSGSAWSHPQF | RMKQIEDKIEEILSKIYHIENEIARIKKLIGER (SEQ |
| | EKGGGSGGGSGGSAWSHPQFEK (SEQ | ID NO: 183)-X3 |
| | ID NO: 424) | |
| AHB2- | MEKKIELEEQVMHVLDQVSELAHELLH | X1- |
| GGGGS9- | KLTGEELERAAYFNWWATEMMLELIKS | ELEEQVMHVLDQVSELAHELLHKLTGEELERAAYFNW |
| 1gcm | DDEREIREIEEEARRILEHLEELARKG | WATEMMLELIKSDDEREIREIEEEARRILEHLEELAR |
| | GGGSGGGGRMKQIEDKIEEILSKIYHI | K (SEQ ID NO: 101)-X2- |
| | ENEIARIKKLIGERGGSGSSGSAWSHP | RMKQIEDKIEEILSKIYHIENEIARIKKLIGER (SEQ |
| | QFEKGGGSGGGSGGSAWSHPQFEK | ID NO: 183)-X3 |
| | (SEQ ID NO: 425) | |
| AHB2- | MEKKIELEEQVMHVLDQVSELAHELLH | X1- |
| GGGGS5- | KLTGEELERAAYFNWWATEMMLELIKS | ELEEQVMHVLDQVSELAHELLHKLTGEELERAAYFNW |
| pRO-2- | DDEREIREIEEEARRILEHLEELARKG | WATEMMLELIKSDDEREIREIEEEARRILEHLEELAR |
| noHis | GSGGGSEYEIRKALEELKASTAELKRS | K (SEQ ID NO: 101)-X2- |
| | TASLRASTEELKKNPSEDALVENNRLI | GSEYEIRKALEELKASTAELKRSTASLRASTEELKKN |
| | VENNAIIVENNRIIAAVLELIVRAIKG | PSEDALVENNRLIVENNAIIVENNRIIAAVLELIVRA |
| | GSGSSGSAWSHPQFEKGGGSGGGSGGS | IK (SEQ ID NO: 184)-X3 |
| | AWSHPQFEK (SEQ ID NO: 426) | |
| AHB2- | MEKKIELEEQVMHVLDQVSELAHELLH | X1- |
| GGGGS7- | KLTGEELERAAYFNWWATEMMLELIKS | ELEEQVMHVLDQVSELAHELLHKLTGEELERAAYFNW |
| PRO-2- | DDEREIREIEEEARRILEHLEELARKG | WATEMMLELIKSDDEREIREIEEEARRILEHLEELAR |
| noHis | GGSGGGGSEYEIRKALEELKASTAELK | K (SEQ ID NO: 101)-X2- |
| | RSTASLRASTEELKKNPSEDALVENNR | GSEYEIRKALEELKASTAELKRSTASLRASTEELKKN |
| | LIVENNAIIVENNRIIAAVLELIVRAI | PSEDALVENNRLIVENNAIIVENNRIIAAVLELIVRA |
| | KGGSGSSGSAWSHPQFEKGGGSGGGSG | IK (SEQ ID NO: 184)-X3 |
| | GSAWSHPQFEK (SEQ ID NO: 427) | |
| AHB2- | MEKKIELEEQVMHVLDQVSELAHELLH | X1- |
| GGGGS9- | KLTGEELERAAYFNWWATEMMLELIKS | ELEEQVMHVLDQVSELAHELLHKLTGEELERAAYFNW |
| pRO-2- | DDEREIREIEEEARRILEHLEELARKG | WATEMMLELIKSDDEREIREIEEEARRILEHLEELAR |
| noHis | GGGSGGGGGSEYEIRKALEELKASTAE | K (SEQ ID NO: 101)-X2- |
| | LKRSTASLRASTEELKKNPSEDALVEN | GSEYEIRKALEELKASTAELKRSTASLRASTEELKKN |
| | NRLIVENNAIIVENNRIIAAVLELIVR | PSEDALVENNRLIVENNAIIVENNRIIAAVLELIVRA |
| | AIKGGSGSSGSAWSHPQFEKGGGSGGG | IK (SEQ ID NO: 184)-X3 |
| | SGGSAWSHPQFEK (SEQ ID NO: | |
| | 428) | |
| AHB2- | MEKKIELEEQVMHVLDQVSELAHELLH | X1- |
| GGGGS5- | KLTGEELERAAYFNWWATEMMLELIKS | ELEEQVMHVLDQVSELAHELLHKLTGEELERAAYFNW |
| 1na0_3 | DDEREIREIEEEARRILEHLEELARKG | WATEMMLELIKSDDEREIREIEEEARRILEHLEELAR |
| | GSGGNLAEKMYKAGNAMYRKGQYTIAI | K (SEQ ID NO: 101)-X2- |
| | IAYTLALLKDPNNAEAWYNLGNAAYKK | NLAEKMYKAGNAMYRKGQYTIAIIAYTLALLKDPNNA |
| | GEYDEAIEAYQKALELDPNNAEAWYNL | EAWYNLGNAAYKKGEYDEAI EAYQKALELDPNNAEAW |
| | GNAYYKQGDYDEAIEYYQKALELDPNN | YNLGNAYYKQGDYDEAIEYYQKALELDPNNAEAKQNL |
| | AEAKONLGNAKOKQGGGSGSSGSAWSH | GNAKQKQG (SEQ ID NO: 185)-X3 |
| | PQFEKGGGSGGGSGGSAWSHPQFEK | |
| | (SEQ ID NO: 429) | |
| AHB2- | MEKKIELEEQVMHVLDQVSELAHELLH | X1- |
| GGGGS7- | KLTGEELERAAYFNWWATEMMLELIKS | ELEEQVMHVLDQVSELAHELLHKLTGEELERAAYFNW |
| 1na0_3 | DDEREIREIEEEARRILEHLEELARKG | WATEMMLELIKSDDEREIREIEEEARRILEHLEELAR |
| | GGSGGGNLAEKMYKAGNAMYRKGQYTI | K (SEQ ID NO: 101)-X2- |
| | AIIAYTLALLKDPNNAEAWYNLGNAAY | NLAEKMYKAGNAMYRKGQYTIAIIAYTLALLKDPNNA |
| | KKGEYDEAIEAYQKALELDPNNAEAWY | EAWYNLGNAAYKKGEYDEAIEAYQKALELDPNNAEAW |
| | NLGNAYYKQGDYDEAIEYYQKALELDP | YNLGNAYYKQGDYDEAIEYYQKALELDPNNAEAKQNL |
| | NNAEAKQNLGNAKQKQGGGSGSSGSAW | GNAKQKQG (SEQ ID NO: 185)-X3 |
| | SHPQFEKGGGSGGGSGGSAWSHPQFEK | |
| | (SEQ ID NO: 430) | |
| AHB2- | MEKKIELEEQVMHVLDQVSELAHELLH | X1- |
| GGGGS9- | KLTGEELERAAYFNWWATEMMLELIKS | ELEEQVMHVLDQVSELAHELLHKLTGEELERAAYFNW |
| 1na0_3 | DDEREIREIEEEARRILEHLEELARKG | WATEMMLELIKSDDEREIREIEEEARRILEHLEELAR |
| | GGGSGGGGNLAEKMYKAGNAMYRKGQY | K (SEQ ID NO: 101)-X2- |
| | TIAIIAYTLALLKDPNNAEAWYNLGNA | NLAEKMYKAGNAMYRKGQYTIAIIAYTLALLKDPNNA |
| | AYKKGEYDEAIEAYQKALELDPNNAEA | EAWYNLGNAAYKKGEYDEAIEAYQKALELDPNNAEAW |
| | WYNLGNAYYKQGDYDEAIEYYQKALEL | YNLGNAYYKQGDYDEAIEYYQKALELDPNNAEAKQNL |
| | DPNNAEAKQNLGNAKQKQGGGSGSSGS | GNAKQKQG (SEQ ID NO: 185)-X3 |
| | AWSHPQFEKGGGSGGGSGGSAWSHPQF | |
| | EK (SEQ ID NO: 431) | |
| AHB2- | MEKKIELEEQVMHVLDQVSELAHELLH | X1- |
| GGGGS5- | KLTGEELERAAYFNWWATEMMLELIKS | ELEEQVMHVLDQVSELAHELLHKLTGEELERAAYFNW |
| 4pn9 | DDEREIREIEEEARRILEHLEELARKG | WATEMMLELIKSDDEREIREIEEEARRILEHLEELAR |
| | GSGGGEIAKSLKEIAKSLKEIAWSLKE | K (SEQ ID NO: 101)-X2- |
| | IAKSLKGGGSGSSGSAWSHPQFEKGGG | GEIAKSLKEIAKSLKEIAWSLKEIAKSLKG (SEQ ID |
| | SGGGSGGSAWSHPQFEK (SEQ ID | NO: 186)-X3 |
| | NO: 432) | |
| AHB2- | MEKKIELEEQVMHVLDQVSELAHELLH | X1- |
| GGGGS7- | KLTGEELERAAYFNWWATEMMLELIKS | ELEEQVMHVLDQVSELAHELLHKLTGEELERAAYFNW |
| 4pn9 | DDEREIREIEEEARRILEHLEELARKG | WATEMMLELIKSDDEREIREIEEEARRILEHLEELAR |
| | GGSGGGGEIAKSLKEIAKSLKEIAWSL | K (SEQ ID NO: 101)-X2- |
| | KEIAKSLKGGGSGSSGSAWSHPQFEKG | GEIAKSLKEIAKSLKEIAWSLKEIAKSLKG (SEQ |
| | GGSGGGSGGSAWSHPQFEK (SEQ ID | ID NO: 186)-X3 |
| | NO: 433) | |
| AHB2- | MEKKIELEEQVMHVLDQVSELAHELLH | X1- |
| GGGGS9- | KLTGEELERAAYFNWWATEMMLELIKS | ELEEQVMHVLDQVSELAHELLHKLTGEELERAAYFNW |
| 4pn9 | DDEREIREIEEEARRILEHLEELARKG | WATEMMLELIKSDDEREIREIEEEARRILEHLEELAR |
| | GGGSGGGGGEIAKSLKEIAKSLKEIAW | K (SEQ ID NO: 101)-X2- |
| | SLKEIAKSLKGGGSGSSGSAWSHPQFE | GEIAKSLKEIAKSLKEIAWSLKEIAKSLKG (SEQ ID |
| | KGGGSGGGSGGSAWSHPQFEK (SEQ | NO: 186)-X3 |
| | ID NO: 434) | |
| AHB2- | MEKKIELEEQVMHVLDQVSELAHELLH | X1- |
| 2GS- | KLTGEELERAAYFNWWATEMMLELIKS | ELEEQVMHVLDQVSELAHELLHKLTGEELERAAYFNW |
| SB175 | DDEREIREIEEEARRILEHLEELARKG | WATEMMLELIKSDDEREIREIEEEARRILEHLEELAR |
| | GSEALEELEKALRELKKSTDELERSTE | K (SEQ ID NO: 101)-X2- |
| | ELEKNPSEDALVENNRLIVENNKIIVE | SEALEELEKALRELKKSTDELERSTEELEKNPSEDAL |
| | VLRIIAKVLKGGSGSSGSAWSHPQFEK | VENNRLIVENNKIIVEVLRIIAKVLK (SEQ ID |
| | GGGSGGGSGGSAWSHPQFEK (SEQ ID | NO: 187)-X3 |
| | NO: 435) | |
| AHB2- | MEKKIELEEQVMHVLDQVSELAHELLH | X1- |
| 4GS- | KLTGEELERAAYFNWWATEMMLELIKS | ELEEQVMHVLDQVSELAHELLHKLTGEELERAAYFNW |
| SB175 | DDEREIREIEEEARRILEHLEELARKG | WATEMMLELIKSDDEREIREIEEEARRILEHLEELAR |
| | GGSSEALEELEKALRELKKSTDELERS | K (SEQ ID NO: 101)-X2- |
| | TEELEKNPSEDALVENNRLIVENNKII | SEALEELEKALRELKKSTDELERSTEELEKNPSEDAL |
| | VEVLRIIAKVLKGGSGSSGSAWSHPQF | VENNRLIVENNKIIVEVLRIIAKVLK (SEQ ID |
| | EKGGGSGGGSGGSAWSHPQFEK (SEQ | NO: 187)-X3 |
| | ID NO: 436) | |
| AHB2- | MEKKIELEEQVMHVLDQVSELAHELLH | X1- |
| 6GS- | KLTGEELERAAYFNWWATEMMLELIKS | ELEEQVMHVLDQVSELAHELLHKLTGEELERAAYFNW |
| SB175 | DDEREIREIEEEARRILEHLEELARKG | WATEMMLELIKSDDEREIREIEEEARRILEHLEELAR |
| | GGGSGSEALEELEKALRELKKSTDELE | K (SEQ ID NO: 101)-X2- |
| | RSTEELEKNPSEDALVENNRLIVENNK | SEALEELEKALRELKKSTDELERSTEELEKNPSEDAL |
| | IIVEVLRIIAKVLKGGSGSSGSAWSHP | VENNRLIVENNKIIVEVLRIIAKVLK (SEQ ID |
| | QFEKGGGSGGGSGGSAWSHPQFEK | NO: 187)-X3 |
| | (SEQ ID NO: 437) | |
| AHB2- | MEKKIELEEQVMHVLDQVSELAHELLH | X1- |
| 2GS- | KLTGEELERAAYFNWWATEMMLELIKS | ELEEQVMHVLDQVSELAHELLHKLTGEELERAAYFNW |
| SB175.1 | DDEREIREIEEEARRILEHLEELARKG | WATEMMLELIKSDDEREIREIEEEARRILEHLEELAR |
| | GSPELEKALRELKKSTDELERSTEELE | K (SEQ ID NO: 101)-X2- |
| | KNGSPEALVENNRLIVENNKIIVEVLR | SPELEKALRELKKSTDELERSTEELEKNGSPEALVEN |
| | IIAKGGSGSSGSAWSHPQFEKGGGSGG | NRLIVENNKIIVEVLRIIAK (SEQ ID NO: 188)- |
| | GSGGSAWSHPQFEK (SEQ ID NO: | X3 |
| | 438) | |
| AHB2- | MEKKIELEEQVMHVLDQVSELAHELLH | X1- |
| 4GS- | KLTGEELERAAYFNWWATEMMLELIKS | ELEEQVMHVLDQVSELAHELLHKLTGEELERAAYFNW |
| SB175.1 | DDEREIREIEEEARRILEHLEELARKG | WATEMMLELIKSDDEREIREIEEEARRILEHLEELAR |
| | GGSSPELEKALRELKKSTDELERSTEE | K (SEQ ID NO: 101)-X2- |
| | LEKNGSPEALVENNRLIVENNKIIVEV | SPELEKALRELKKSTDELERSTEELEKNGSPEALVEN |
| | LRIIAKGGSGSSGSAWSHPQFEKGGGS | NRLIVENNKIIVEVLRIIAK (SEQ ID NO: 188)- |
| | GGGSGGSAWSHPQFEK (SEQ ID NO: | X3 |
| | 439) | |
| AHB2- | MEKKIELEEQVMHVLDQVSELAHELLH | X1- |
| 6GS- | KLTGEELERAAYFNWWATEMMLELIKS | ELEEQVMHVLDQVSELAHELLHKLTGEELERAAYFNW |
| SB175.1 | DDEREIREIEEEARRILEHLEELARKG | WATEMMLELIKSDDEREIREIEEEARRILEHLEELAR |
| | GGGSGSPELEKALRELKKSTDELERST | K (SEQ ID NO: 101)-X2- |
| | EELEKNGSPEALVENNRLIVENNKIIV | SPELEKALRELKKSTDELERSTEELEKNGSPEALVEN |
| | EVLRIIAKGGSGSSGSAWSHPQFEKGG | NRLIVENNKIIVEVLRIIAK (SEQ ID NO: 188)- |
| | GSGGGSGGSAWSHPQFEK (SEQ ID | X3 |
| | NO: 440) | |
| AHB2- | MEKKIELEEQVMHVLDQVSELAHELLH | X1- |
| 2GS- | KLTGEELERAAYFNWWATEMMLELIKS | ELEEQVMHVLDQVSELAHELLHKLTGEELERAAYFNW |
| SB175.2 | DDEREIREIEEEARRILEHLEELARKG | WATEMMLELIKSDDEREIREIEEEARRILEHLEELAR |
| | GSEKALRELKKSTDELERSTEELEKNG | K (SEQ ID NO: 101)-X2- |
| | SPEALVENNRLIVENNKIIVEVLRGGS | SEKALRELKKSTDELERSTEELEKNGSPEALVENNRL |
| | GSSGSAWSHPQFEKGGGSGGGSGGSAW | IVENNKIIVEVLR (SEQ ID NO: 189)-X3 |
| | SHPQFEK (SEQ ID NO: 441) | |
| AHB2- | MEKKIELEEQVMHVLDQVSELAHELLH | X1- |
| 4GS- | KLTGEELERAAYFNWWATEMMLELIKS | ELEEQVMHVLDQVSELAHELLHKLTGEELERAAYFNW |
| SB175.2 | DDEREIREIEEEARRILEHLEELARKG | WATEMMLELIKSDDEREIREIEEEARRILEHLEELAR |
| | GGSSEKALRELKKSTDELERSTEELEK | K (SEQ ID NO: 101)-X2- |
| | NGSPEALVENNRLIVENNKIIVEVLRG | SEKALRELKKSTDELERSTEELEKNGSPEALVENNRL |
| | GSGSSGSAWSHPQFEKGGGSGGGSGGS | IVENNKIIVEVLR (SEQ ID NO: 189)-X3 |
| | AWSHPQFEK (SEQ ID NO: 442) | |
| AHB2- | MEKKIELEEQVMHVLDQVSELAHELLH | X1- |
| 6GS- | KLTGEELERAAYFNWWATEMMLELIKS | ELEEQVMHVLDQVSELAHELLHKLTGEELERAAYFNW |
| SB175.2 | DDEREIREIEEEARRILEHLEELARKG | WATEMMLELIKSDDEREIREIEEEARRILEHLEELAR |
| | GGGSGSEKALRELKKSTDELERSTEEL | K-X2- |
| | EKNGSPEALVENNRLIVENNKIIVEVL | SEKALRELKKSTDELERSTEELEKNGSPEALVENNRL |
| | RGGSGSSGSAWSHPQFEKGGGSGGGSG | IVENNKIIVEVLR (SEQ ID NO: 189)-X3 |
| | GSAWSHPQFEK (SEQ ID NO: 443) | |
| SB175- | MEKKISAWSHPQFEKGGGSGGGSGGSA | X1- |
| 6GS- | WSHPQFEKGGSGSSGSEALEELEKALR | SEALEELEKALRELKKSTDELERSTEELEKNPSEDAL |
| LCB1v2.2 | ELKKSTDELERSTEELEKNPSEDALVE | VENNRLIVENNKIIVEVLRIIAKVLK (SEQ ID |
| | NNRLIVENNKIIVEVLRIIAKVLKGGG | NO: 187)-X2- |
| | GSGDKENVLQKIYEIMKELERLGHAEA | DKENVLQKIYEIMKELERLGHAEASMQVSDLIYEFMK |
| | SMQVSDLIYEFMKTKDENLLEEAERLL | TKDENLLEEAERLLEEVKR (SEQ ID NO: 135) |
| | EEVKR (SEQ ID NO: 444) | |
| SB175- | MEKKISAWSHPQFEKGGGSGGGSGGSA | X1- |
| 10GS- | WSHPQFEKGGSGSSGSEALEELEKALR | SEALEELEKALRELKKSTDELERSTEELEKNPSEDAL |
| LCB1v2.2 | ELKKSTDELERSTEELEKNPSEDALVE | VENNRLIVENNKIIVEVLRIIAKVLK (SEQ ID |
| | NNRLIVENNKIIVEVLRIIAKVLKGGG | NO: 187)-X2- |
| | GSGGGGSDKENVLQKIYEIMKELERLG | DKENVLQKIYEIMKELERLGHAEASMQVSDLIYEFMK |
| | HAEASMQVSDLIYEFMKTKDENLLEEA | TKDENLLEEAERLLEEVKR (SEQ ID NO: 135) |
| | ERLLEEVKR (SEQ ID NO: 445) | |
| SB175.1- | MEKKISAWSHPQFEKGGGSGGGSGGSA | X1- |
| 6GS- | WSHPQFEKGGSGSSGSPELEKALRELK | SPELEKALRELKKSTDELERSTEELEKNGSPEALVEN |
| LCB1v2.2 | KSTDELERSTEELEKNGSPEALVENNR | NRLIVENNKIIVEVLRIIAK (SEQ ID NO: 188)- |
| | LIVENNKIIVEVLRIIAKGGGGSGDKE | X2- |
| | NVLQKIYEIMKELERLGHAEASMQVSD | DKENVLQKIYEIMKELERLGHAEASMQVSDLIYEFMK |
| | LIYEFMKTKDENLLEEAERLLEEVKR | TKDENLLEEAERLLEEVKR (SEQ ID NO: 135) |
| | (SEQ ID NO: 446) | |
| SB175.1- | MEKKISAWSHPQFEKGGGSGGGSGGSA | X1- |
| 10GS- | WSHPQFEKGGSGSSGSPELEKALRELK | SPELEKALRELKKSTDELERSTEELEKNGSPEALVEN |
| LCB1v2.2 | KSTDELERSTEELEKNGSPEALVENNR | NRLIVENNKIIVEVLRIIAK (SEQ ID NO: 188)- |
| | LIVENNKIIVEVLRIIAKGGGGSGGGG | X2 |
| | SDKENVLQKIYEIMKELERLGHAEASM | DKENVLQKIYEIMKELERLGHAEASMQVSDLIYEFMK |
| | QVSDLIYEFMKTKDENLLEEAERLLEE | TKDENLLEEAERLLEEVKR (SEQ ID NO: 135) |
| | VKR (SEQ ID NO: 447) | |
| LCB3- | MEKKINLDELHMQMTDLVYEALHFAKD | X1- |
| 8GS- | EEFQKHVFQLFEKATKAYKNKDRQKLE | NLDELHMQMTDLVYEALHFAKDEEFQKHVFQLFEKAT |
| SB175 | KVVEELKELLERLLSGGGGSGGGSEAL | KAYKNKDROKLEKVVEELKELLERLLS (SEQ ID |
| | EELEKALRELKKSTDELERSTEELEKN | NO: 155)-X2- |
| | PSEDALVENNRLIVENNKIIVEVLRII | SEALEELEKALRELKKSTDELERSTEELEKNPSEDAL |
| | AKVLKGGASPAAPAGGSAWSHPQFEKG | VENNRLIVENNKIIVEVLRIIAKVLK (SEQ ID |
| | GGSGGGSGGSAWSHPQFEK (SEQ ID | NO: 187)-X3 |
| | NO: 448) | |
| LCB3- | MEKKINLDELHMQMTDLVYEALHFAKD | X1- |
| 6GS- | EEFQKHVFQLFEKATKAYKNKDRQKLE | NLDELHMQMTDLVYEALHFAKDEEFQKHVFQLFEKAT |
| SB175 | KVVEELKELLERLLSGGGGSGSEALEE | KAYKNKDROKLEKVVEELKELLERLLS (SEQ ID |
| | LEKALRELKKSTDELERSTEELEKNPS | NO: 155)-X2- |
| | EDALVENNRLIVENNKIIVEVLRILAK | SEALEELEKALRELKKSTDELERSTEELEKNPSEDAL |
| | VLKGGASPAAPAGGSAWSHPQFEKGGG | VENNRLIVENNKIIVEVLRIIAKVLK (SEQ ID |
| | SGGGSGGSAWSHPQFEK (SEQ ID | NO: 187)-X3 |
| | NO: 449) | |
| LCB3- | MEKKINLDELHMQMTDLVYEALHFAKD | X1- |
| 4GS- | EEFQKHVFQLFEKATKAYKNKDRQKLE | NLDELHMQMTDLVYEALHFAKDEEFQKHVFQLFEKAT |
| SB175 | KVVEELKELLERLLSGGGSSEALEELE | KAYKNKDRQKLEKVVEELKELLERLLS (SEQ ID |
| | KALRELKKSTDELERSTEELEKNPSED | NO: 155)-X2- |
| | ALVENNRLIVENNKIIVEVLRIIAKVL | SEALEELEKALRELKKSTDELERSTEELEKNPSEDAL |
| | KGGASPAAPAGGSAWSHPQFEKGGGSG | VENNRLIVENNKIIVEVLRIIAKVLK (SEQ ID |
| | GGSGGSAWSHPQFEK (SEQ ID NO: | NO: 187)-X3 |
| | 450) | |
| LCB3- | MEKKINLDELHMQMTDLVYEALHFAKD | X1- |
| 2GS- | EEFQKHVFQLFEKATKAYKNKDRQKLE | NLDELHMQMTDLVYEALHFAKDEEFQKHVFQLFEKAT |
| SB175 | KVVEELKELLERLLSGGSEALEELEKA | KAYKNKDROKLEKVVEELKELLERLLS (SEQ ID |
| | LRELKKSTDELERSTEELEKNPSEDAL | NO: 155)-X2- |
| | VENNRLIVENNKIIVEVLRIIAKVLKG | SEALEELEKALRELKKSTDELERSTEELEKNPSEDAL |
| | GASPAAPAGGSAWSHPQFEKGGGSGGG | VENNRLIVENNKIIVEVLRIIAKVLK (SEQ |
| | SGGSAWSHPQFEK (SEQ ID NO: | ID NO: 187)-X3 |
| | 451) | |
| AHB2v1- | MEKKIELEEQVMHVLDQVSELAHELLH | X1- |
| 2GS- | KLTGEELERAAYFNWWATEMMLELIKS | ELEEQVMHVLDQVSELAHELLHKLTGEELERAAYFNW |
| SB175 | DDEREIREIEEEARRILEHLEELARKG | WATEMMLELIKSDDEREIREIEEEARRILEHLEELAR |
| | GSEALEELEKALRELKKSTDELERSTE | K (SEQ ID NO: 101)-X2- |
| | ELEKNPSEDALVENNRLIVENNKIIVE | SEALEELEKALRELKKSTDELERSTEELEKNPSEDAL |
| | VLRIIAKVLKGGSGSSGSAWSHPQFEK | VENNRLIVENNKIIVEVLRIIAKVLK (SEQ ID |
| | GGGSGGGSGGSAWSHPQFEK (SEQ ID | NO: 187)-X3 |
| | NO: 452) | |
| AHB2v2- | MEKKIELEEQVMHVLDQVSELAHELLH | X1- |
| 2GS- | KLTGEELERAAYFNWWATEMMLELIKS | ELEEQVMHVLDQVSELAHELLHKLTGEELERAAYFNW |
| SB175 | DDEREIREIEEEAARILEHLEELARTG | WATEMMLELIKSDDEREIREIEEEAARILEHLEELAR |
| | GSEALEELEKALRELKKSTDELERSTE | T (SEQ ID NO: 164)-X2- |
| | ELEKNPSEDALVENNRLIVENNKIIVE | SEALEELEKALRELKKSTDELERSTEELEKNPSEDAL |
| | VLRIIAKVLKGGSGSSGSAWSHPQFEK | VENNRLIVENNKIIVEVLRIIAKVLK (SEQ ID |
| | GGGSGGGSGGSAWSHPQFEK (SEQ ID | NO: 187)-X3 |
| | NO: 453) | |

TABLE 9A

| SEQ | | |
|---|---|---|
| ID | Name | Sequence |
| 595 | AHB2-6GS- | ELEEQVMHVLDQVSELAHELLHKLTGEELERAAYFNWWATEMMLELIKSDDEREIRE |
| | 1rfo | IEEEARRILEHLEELARKGSGSGSGYIPEAPRDGQAYVRKDGEWVLLSTFL |
| 596 | AHB2-28GS- | ELEEQVMHVLDQVSELAHELLHKLTGEELERAAYFNWWATEMMLELIKSDDEREIRE |
| | AHB2-6GS- | IEEEARRILEHLEELARKGSGSGSGSGSGSGSGSGSGSGSGSGSGSELEEQVMHVLD |
| | 1rfo | QVSELAHELLHKLTGEELERAAYFNWWATEMMLELIKSDDEREIREIEEEARRILEH |
| | | LEELARKGSGSGSGYIPEAPRDGQAYVRKDGEWVLLSTFL |
| 597 | AHB2-5GS- | ELEEQVMHVLDQVSELAHELLHKLTGEELERAAYFNWWATEMMLELIKSDDEREIRE |
| | 1rfo | IEEEARRILEHLEELARKGSGSGGYIPEAPRDGQAYVRKDGEWVLLSTFL |
| 598 | AHB2-4GS- | ELEEQVMHVLDQVSELAHELLHKLTGEELERAAYFNWWATEMMLELIKSDDEREIRE |
| | 1rfo | IEEEARRILEHLEELARKGSGSGYIPEAPRDGQAYVRKDGEWVLLSTFL |
| 599 | AHB2-3GS- | ELEEQVMHVLDQVSELAHELLHKLTGEELERAAYFNWWATEMMLELIKSDDEREIRE |
| | 1rfo | IEEEARRILEHLEELARKGSGGYIPEAPRDGQAYVRKDGEWVLLSTFL |
| 600 | AHB2-28GS- | ELEEQVMHVLDQVSELAHELLHKLTGEELERAAYFNWWATEMMLELIKSDDEREIRE |
| | AHB2-3GS- | IEEEARRILEHLEELARKGSGSGSGSGSGSGSGSGSGSGSGSGSGSELEEQVMHVLD |
| | 1rfo | QVSELAHELLHKLTGEELERAAYFNWWATEMMLELIKSDDEREIREIEEEARRILEH |
| | | LEELARKGSGGYIPEAPRDGQAYVRKDGEWVLLSTFL |
| 601 | AHB2-4GS- | ELEEQVMHVLDQVSELAHELLHKLTGEELERAAYFNWWATEMMLELIKSDDEREIRE |
| | 5L6HC3_1 | IEEEARRILEHLEELARKGSGSSEELRAVADLQRLNIELARKLLEAVARLQELNIDL |
| | | VRKTSELTDEKTIREEIRKVKEESKRIVEEAEEEIRRAKEESRKIADESR |
| 602 | AHB2-5GS- | ELEEQVMHVLDQVSELAHELLHKLTGEELERAAYFNWWATEMMLELIKSDDEREIRE |
| | 5L6HC3_1 | IEEEARRILEHLEELARKGSGSGSEELRAVADLQRLNIELARKLLEAVARLQELNID |
| | | LVRKTSELTDEKTIREEIRKVKEESKRIVEEAEEEIRRAKEESRKIADESR |
| 603 | AHB2-28GS- | ELEEQVMHVLDQVSELAHELLHKLTGEELERAAYFNWWATEMMLELIKSDDEREIRE |
| | AHB2-4GS- | IEEEARRILEHLEELARKGSGSGSGSGSGSGSGSGSGSGSGSGSGSELEEQVMHVLD |
| | 5L6HC3_1 | QVSELAHELLHKLTGEELERAAYFNWWATEMMLELIKSDDEREIREIEEEARRILEH |
| | | LEELARKGSGSSEELRAVADLQRLNIELARKLLEAVARLQELNIDLVRKTSELTDEK |
| | | TIREEIRKVKEESKRIVEEAEEEIRRAKEESRKIADESR |
| 604 | AHB2-28GS- | ELEEQVMHVLDQVSELAHELLHKLTGEELERAAYFNWWATEMMLELIKSDDEREIRE |
| | AHB2-5GS- | IEEEARRILEHLEELARKGSGSGSGSGSGSGSGSGSGSGSGSGSGSELEEQVMHVLD |
| | 5L6HC3_1 | QVSELAHELLHKLTGEELERAAYFNWWATEMMLELIKSDDEREIREIEEEARRILEH |
| | | LEELARKGSGSGSEELRAVADLQRLNIELARKLLEAVARLQELNIDLVRKTSELTDE |
| | | KTIREEIRKVKEESKRIVEEAEEEIRRAKEESRKIADESR |
| 605 | LCB3-6GS- | NLDELHMQMTDLVYEALHFAKDEEFQKHVFQLFEKATKAYKNKDRQKLEKVVEELKE |
| | 1rfo | LLERLLSGSGSGSGYIPEAPRDGQAYVRKDGEWVLLSTFL |
| 606 | LCB3-5GS- | NLDELHMQMTDLVYEALHFAKDEEFQKHVFQLFEKATKAYKNKDRQKLEKVVEELKE |
| | 1rfo | LLERLLSGSGSGGYIPEAPRDGQAYVRKDGEWVLLSTFL |
| 607 | LCB3-4GS- | NLDELHMQMTDLVYEALHFAKDEEFQKHVFQLFEKATKAYKNKDRQKLEKVVEELKE |
| | 1rfo | LLERLLSGSGSGYIPEAPRDGQAYVRKDGEWVLLSTFL |
| 608 | LCB3-5GS- | NLDELHMQMTDLVYEALHFAKDEEFQKHVFQLFEKATKAYKNKDRQKLEKVVEELKE |
| | 5L6HC3_1 | LLERLLSGSGSGSEELRAVADLQRLNIELARKLLEAVARLQELNIDLVRKTSELTDE |
| | | KTIREEIRKVKEESKRIVEEAEEEIRRAKEESRKIADESR |
| 609 | LCB3-28GS- | NLDELHMQMTDLVYEALHFAKDEEFQKHVFQLFEKATKAYKNKDRQKLEKVVEELKE |
| | LCB3-4GS- | LLERLLSGSGSGSGSGSGSGSGSGSGSGSGSGSGSNLDELHMQMTDLVYEALHFAKD |
| | 5L6HC3_1 | EEFQKHVFQLFEKATKAYKNKDRQKLEKVVEELKELLERLLSGSGSSEELRAVADLQ |
| | | RLNIELARKLLEAVARLQELNIDLVRKTSELTDEKTIREEIRKVKEESKRIVEEAEE |
| | | EIRRAKEESRKIADESR |
| 610 | LCB3-28GS- | NLDELHMQMTDLVYEALHFAKDEEFQKHVFQLFEKATKAYKNKDRQKLEKVVEELKE |
| | LCB3-5GS- | LLERLLSGSGSGSGSGSGSGSGSGSGSGSGSGSGSNLDELHMQMTDLVYEALHFAKD |
| | 5L6HC3_1 | EEFQKHVFQLFEKATKAYKNKDRQKLEKVVEELKELLERLLSGSGSGSEELRAVADL |
| | | QRLNIELARKLLEAVARLQELNIDLVRKTSELTDEKTIREEIRKVKEESKRIVEEAE |
| | | EEIRRAKEESRKIADESR |
| 611 | 36729.2_LCB | EEAELAYLLGELAYKLGEYRIAIRAYRIALKRDPNNAEAWYNLGNAYYKQGDYDEAI |
| | 1v2.2_6GS | EYYQKALELDPNNAEAWYNLGNAYYKQGDYDEAIEYYQKALELDPNNAEAWYNLGNA |
| | | YYKQGDYDEAIEYYQKALELGSGSGSDKENVLQKIYEIMKELERLGHAEASMQVSDL |
| | | IYEFMKTKDENLLEEAERLLEEVKR |
| 612 | 36729.2_LCB | EEAELAYLLGELAYKLGEYRIAIRAYRIALKRDPNNAEAWYNLGNAYYKQGDYDEAI |
| | 1v2.2_4GS | EYYQKALELDPNNAEAWYNLGNAYYKQGDYDEAIEYYQKALELDPNNAEAWYNLGNA |
| | | YYKQGDYDEAIEYYQKALELGSGSDKENVLQKIYEIMKELERLGHAEASMQVSDLIY |
| | | EFMKTKDENLLEEAERLLEEVKR |
| 613 | 36729.2_LCB | EEAELAYLLGELAYKLGEYRIAIRAYRIALKRDPNNAEAWYNLGNAYYKQGDYDEAI |
| | 1v2.2_2GS | EYYQKALELDPNNAEAWYNLGNAYYKQGDYDEAIEYYQKALELDPNNAEAWYNLGNA |
| | | YYKQGDYDEAIEYYQKALELGSDKENVLQKIYEIMKELERLGHAEASMQVSDLIYEF |
| | | MKTKDENLLEEAERLLEEVKR |
| 614 | LCB3-PAS24- | NLDELHMQMTDLVYEALHFAKDEEFQKHVFQLFEKATKAYKNKDRQKLEKVVEELKE |
| | LCB3-4GS- | LLERLLSGGASPAAPAPASPAAPAPSAPAGGNLDELHMQMTDLVYEALHFAKDEEFQ |
| | 5L6HC3_1 | KHVFQLFEKATKAYKNKDRQKLEKVVEELKELLERLLSGSGSSEELRAVADLQRLNI |
| | | ELARKLLEAVARLQELNIDLVRKTSELTDEKTIREEIRKVKEESKRIVEEAEEEIRR |
| | | AKEESRKIADESR |
| 615 | LCB3-PAS24- | NLDELHMQMTDLVYEALHFAKDEEFQKHVFQLFEKATKAYKNKDRQKLEKVVEELKE |
| | LCB3-5GS- | LLERLLSGGASPAAPAPASPAAPAPSAPAGGNLDELHMQMTDLVYEALHFAKDEEFQ |
| | 5L6HC3_1 | KHVFQLFEKATKAYKNKDRQKLEKVVEELKELLERLLSGSGSGSEELRAVADLQRLN |
| | | IELARKLLEAVARLQELNIDLVRKTSELTDEKTIREEIRKVKEESKRIVEEAEEEIR |
| | | RAKEESRKIADESR |
| 616 | LCB1-10GS- | DKENVLQKIYEIMKELERLGHAEASMQVSDLIYEFMKTKDENLLEEAERLLEEVKRG |
| | AHB2-4GS- | GGSGGGSGGELEEQVMHVLDQVSELAHELLHKLTGEELERAAYFNWWATEMMLELIK |
| | 1rfo | SDDEREIREIEEEARRILEHLEELARKGSGSGYIPEAPRDGQAYVRKDGEWVLLSTF |
| | | L |
| 617 | LCB1-28GS- | DKENVLQKIYEIMKELERLGHAEASMQVSDLIYEFMKTKDENLLEEAERLLEEVKRG |
| | AHB2-4GS- | SGSGSGSGSGSGSGSGSGSGSGSGSGSELEEQVMHVLDQVSELAHELLHKLTGEELE |
| | 1rfo | RAAYFNWWATEMMLELIKSDDEREIREIEEEARRILEHLEELARKGSGSGYIPEAPR |
| | | DGQAYVRKDGEWVLLSTFL |
| 618 | LCB3-10GS- | NLDELHMQMTDLVYEALHFAKDEEFQKHVFQLFEKATKAYKNKDRQKLEKVVEELKE |
| | AHB2-4GS- | LLERLLSGGGSGGGSGGELEEQVMHVLDQVSELAHELLHKLTGEELERAAYFNWWAT |
| | 1rfo | EMMLELIKSDDEREIREIEEEARRILEHLEELARKGSGSGYIPEAPRDGQAYVRKDG |
| | | EWVLLSTFL |
| 619 | LCB3-16GS- | MLDELHMQMTDLVYEALHFAKDEEFQKHVFQLFEKATKAYKNKDRQKLEKVVEELKE |
| | AHB2-4GS- | LLERLLSGSGSGSGSGSGSGSGSELEEQVMHVLDQVSELAHELLHKLTGEELERAAY |
| | 1rfo | FNWWATEMMLELIKSDDEREIREIEEEARRILEHLEELARKGSGSGYIPEAPRDGQA |
| | | YVRKDGEWVLLSTFL |
| 620 | 36729.2_6GS_ | EEAELAYLLGELAYKLGEYRIAIRAYRIALKRDPNNAEAWYNLGNAYYKQGDYDEAI |
| | LCB1v2.2- | EYYQKALELDPNNAEAWYNLGNAYYKQGDYDEAIEYYQKALELDPNNAEAWYNLGNA |
| | 28GS-LCB3 | YYKQGDYDEAIEYYQKALELGSGSGSDKENVLQKIYEIMKELERLGHAEASMQVSDL |
| | | IYEFMKTKDENLLEEAERLLEEVKRGSGSGSGSGSGSGSGSGSGSGSGSGSGSNLDE |
| | | LHMQMTDLVYEALHFAKDEEFQKHVFQLFEKATKAYKNKDRQKLEKVVEELKELLER |
| | | LLS |
| 621 | 36729.2_6GS_ | EEAELAYLLGELAYKLGEYRIAIRAYRIALKRDPNNAEAWYNLGNAYYKQGDYDEAI |
| | LCB1v2.2- | EYYQKALELDPNNAEAWYNLGNAYYKQGDYDEAIEYYQKALELDPNNAEAWYNLGNA |
| | 9GS-LCB3 | YYKQGDYDEAIEYYQKALELGSGSGSDKENVLQKIYEIMKELERLGHAEASMQVSDL |
| | | IYEFMKTKDENLLEEAERLLEEVKRGSGSGSGSGNLDELHMQMTDLVYEALHFAKDE |
| | | EFQKHVFQLFEKATKAYKNKDRQKLEKVVEELKELLERLLS |
| 622 | 36729.2_6GS_ | EEAELAYLLGELAYKLGEYRIAIRAYRIALKRDPNNAEAWYNLGNAYYKQGDYDEAI |
| | LCB1v2.2- | EYYQKALELDPNNAEAWYNLGNAYYKQGDYDEAIEYYQKALELDPNNAEAWYNLGNA |
| | 28GS-AHB2 | YYKQGDYDEAIEYYQKALELGSGSGSDKENVLQKIYEIMKELERLGHAEASMQVSDL |
| | | IYEFMKTKDENLLEEAERLLEEVKRGSGSGSGSGSGSGSGSGSGSGSGSGSGSELEE |
| | | QVMHVLDQVSELAHELLHKLTGEELERAAYFNWWATEMMLELIKSDDEREIREIEEE |
| | | ARRILEHLEELARK |
| 623 | 36729.2_6GS_ | EEAELAYLLGELAYKLGEYRIAIRAYRIALKRDPNNAEAWYNLGNAYYKQGDYDEAI |
| | LCB1v2.2- | EYYQKALELDPNNAEAWYNLGNAYYKQGDYDEAIEYYQKALELDPNNAEAWYNLGNA |
| | 9GS-AHB2 | YYKQGDYDEAIEYYQKALELGSGSGSDKENVLQKIYEIMKELERLGHAEASMQVSDL |
| | | IYEFMKTKDENLLEEAERLLEEVKRGSGSGSGSGELEEQVMHVLDQVSELAHELLHK |
| | | LTGEELERAAYFNWWATEMMLELIKSDDEREIREIEEEARRILEHLEELARK |
| 624 | LCB1-10GS- | DKENVLQKIYEIMKELERLGHAEASMQVSDLIYEFMKTKDENLLEEAERLLEEVKRG |
| | LCB3-4GS- | GGSGGGSGGNLDELHMQMTDLVYEALHFAKDEEFQKHVFQLFEKATKAYKNKDRQKL |
| | 1rfo | EKVVEELKELLERLLSGSGSGYIPEAPRDGQAYVRKDGEWVLLSTFL |
| 625 | LCB1-28GS- | DKENVLQKIYEIMKELERLGHAEASMQVSDLIYEFMKTKDENLLEEAERLLEEVKRG |
| | LCB3-4GS- | SGSGSGSGSGSGSGSGSGSGSGSGSGSNLDELHMQMTDLVYEALHFAKDEEFQKHVF |
| | 1rfo | QLFEKATKAYKNKDRQKLEKVVEELKELLERLLSGSGSGYIPEAPRDGQAYVRKDGE |
| | | WVLLSTFL |
| 626 | AHB2-10GS- | ELEEQVMHVLDQVSELAHELLHKLTGEELERAAYFNWWATEMMLELIKSDDEREIRE |
| | LCB3-4GS- | IEEEARRILEHLEELARKGGGSGGGSGGNLDELHMQMTDLVYEALHFAKDEEFQKHV |
| | 1rfo | FQLFEKATKAYKNKDRQKLEKVVEELKELLERLLSGSGSGYIPEAPRDGQAYVRKDG |
| | | EWVLLSTFL |
| 627 | AHB2-16GS- | ELEEQVMHVLDQVSELAHELLHKLTGEELERAAYFNWWATEMMLELIKSDDEREIRE |
| | LCB3-4GS- | IEEEARRILEHLEELARKGSGSGSGSGSGSGSGSNLDELHMQMTDLVYEALHFAKDE |
| | 1rfo | EFQKHVFQLFEKATKAYKNKDRQKLEKVVEELKELLERLLSGSGSGYIPEAPRDGQA |
| | | YVRKDGEWVLLSTFL |
| 628 | LCB1-9GS- | DKENVLQKIYEIMKELERLGHAEASMQVSDLIYEFMKTKDENLLEEAERLLEEVKRG |
| | LCB3-5GS- | SGSGSGSGNLDELHMQMTDLVYEALHFAKDEEFQKHVFQLFEKATKAYKNKDRQKLE |
| | 5L6HC3_1 | KVVEELKELLERLLSGSGSGSEELRAVADLQRLNIELARKLLEAVARLQELNIDLVR |
| | | KTSELTDEKTIREEIRKVKEESKRIVEEAEEEIRRAKEESRKIADESR |
| 629 | AHB2-9GS- | ELEEQVMHVLDQVSELAHELLHKLTGEELERAAYFNWWATEMMLELIKSDDEREIRE |
| | LCB3-5GS- | IEEEARRILEHLEELARKGSGSGSGSGNLDELHMQMTDLVYEALHFAKDEEFQKHVF |
| | 5L6HC3_1 | QLFEKATKAYKNKDRQKLEKVVEELKELLERLLSGSGSGSEELRAVADLQRLNIELA |
| | | RKLLEAVARLQELNIDLVRKTSELTDEKTIREEIRKVKEESKRIVEEAEEEIRRAKE |
| | | ESRKIADESR |
| 630 | AHB2-4GS- | ELEEQVMHVLDQVSELAHELLHKLTGEELERAAYFNWWATEMMLELIKSDDEREIRE |
| | 1na0_int2- | IEEEARRILEHLEELARKGSGSEEAELAYLLGELAYKLGEYRIAIRAYRIALKRDPN |
| | R3 | NAEAWYNLGNAYYKQGDYDEAIYYQKALELDPNNAEAKQNLGNAKQKQ |
| 631 | AHB2-6GS- | ELEEQVMHVLDQVSELAHELLHKLTGEELERAAYFNWWATEMMLELIKSDDEREIRE |
| | 1na0_int2- | IEEEARRILEHLEELARKGSGSGSEEAELAYLLGELAYKLGEYRIAIRAYRIALKRD |
| | R3 | PNNAEAWYNLGNAYYKQGDYDEIEYYQKALELDPNNAEAKQNLGNAKQKQ |
| 632 | AHB2-4GS- | ELEEQVMHVLDQVSELAHELLHKLTGEELERAAYFNWWATEMMLELIKSDDEREIRE |
| | 1na0_int2 | IEEEARRILEHLEELARKGSGSEEAELAYLLGELAYKLGEYRIAIRAYRIALKRDPN |
| | | NAEAWYNLGNAYYKQGDYDEAIYYQKALELDPNNAEAWYNLGNAYYKQGDYDEAIEY |
| | | YQKALELDPNNAEAKQNLGNKQKQ |
| 633 | AHB2-6GS- | ELEEQVMHVLDQVSELAHELLHKLTGEELERAAYFNWWATEMMLELIKSDDEREIRE |
| | 1na0_int2 | IEEEARRILEHLEELARKGSGSGSEEAELAYLLGELAYKLGEYRIAIRAYRIALKRD |
| | | PNNAEAWYNLGNAYYKQGDYDEAIYYQKALELDPNNAEAWYNLGNAYYKQGDYDEAI |
| | | EYYQKALELDPNNAEAKQNLGNKQKQ |
| 634 | AHB2-4GS- | ELEEQVMHVLDQVSELAHELLHKLTGEELERAAYFNWWATEMMLELIKSDDEREIRE |
| | 6msr | IEEEARRILEHLEELARKGSGSGSEYEIRKALEELKASTAELKRATASLRASTEELK |
| | | KNPSEDALVENNRLIVEHNAIIVENRIIAAVLELIVRAIK |
| 635 | AHB2-6GS- | ELEEQVMHVLDQVSELAHELLHKLTGEELERAAYFNWWATEMMLELIKSDDEREIRE |
| | 6msr | IEEEARRILEHLEELARKGSGSGSGSEYEIRKALEELKASTAELKRATASLRASTEE |
| | | LKKNPSEDALVENNRLIVEHNAIIVENRIIAAVLELIVRAIK |
| 636 | 36729.2_ | EEAELAYLLGELAYKLGEYRIAIRAYRIALKRDPNNAEAWYNLGNAYYKQGDYDEAI |
| | LCB1v2.2_6GS | EYYQKALELDPNNAEAWYNLGNAYYKQGDYDEAIEYYQKALELDPNNAEAWYNLGNA |
| | | YYKQGDYDEAIEYYQKALELGSGSGSDKENVLQKIYEIMKELERLGHAEASMQVSDL |
| | | IYEFMKTKDENLLEEAERLLEEVKR |
| 637 | 36729.2_ | EEAELAYLLGELAYKLGEYRIAIRAYRIALKRDPNNAEAWYNLGNAYYKQGDYDEAI |
| | LCB1v2.2_4GS | EYYQKALELDPNNAEAWYNLGNAYYKQGDYDEAIEYYQKALELDPNNAEAWYNLGNA |
| | | YYKQGDYDEAIEYYQKALELGSGSDKENVLQKIYEIMKELERLGHAEASMQVSDLIY |
| | | EFMKTKDENLLEEAERLLEEVKR |
| 638 | 36729.2_ | EEAELAYLLGELAYKLGEYRIAIRAYRIALKRDPNNAEAWYNLGNAYYKQGDYDEAI |
| | LCB1v2.2_2GS | EYYQKALELDPNNAEAWYNLGNAYYKQGDYDEAIEYYQKALELDPNNAEAWYNLGNA |
| | | MKTKDENLLEEAERLLEEVKR |
| 639 | AHB2-8GS- | ELEEQVMHVLDQVSELAHELLHKLTGEELERAAYFNWWATEMMLELIKSDDEREIRE |
| | 1na0_int2- | IEEEARRILEHLEELARKGSGSGSGSEEAELAYLLGELAYKLGEYRIAIRAYRIALK |
| | R3 | RDPNNAEAWYNLGNAYYKQGDYDEAIEYYQKALELDPNNAEAKQNLGNAKQKQG |
| 640 | AHB2-8GS- | ELEEQVMHVLDQVSELAHELLHKLTGEELERAAYFNWWATEMMLELIKSDDEREIRE |
| | 1na0_int2 | IEEEARRILEHLEELARKGSGSGSGSEEAELAYLLGELAYKLGEYRIAIRAYRIALK |
| | | RDPNNAEAWYNLGNAYYKQGDYDEAIEYYQKALELDPNNAEAWYNLGNAYYKQGDYD |
| | | EAIEYYQKALELDPNNAEAKQNLGNAKQKQG |
| 641 | AHB2-8GS- | ELEEQVMHVLDQVSELAHELLHKLTGEELERAAYFNWWATEMMLELIKSDDEREIRE |
| | 6msr | IEEEARRILEHLEELARKGSGSGSGSGSEYEIRKALEELKASTAELKRATASLRAST |
| | | EELKKNPSEDALVENNRLIVEHNAIIVENNRIIAAVLELIVRAIK |
| 642 | AHB2-10GS- | ELEEQVMHVLDQVSELAHELLHKLTGEELERAAYFNWWATEMMLELIKSDDEREIRE |
| | 6msr | IEEEARRILEHLEELARKGSGSGSGSGSGSEYEIRKALEELKASTAELKRATASLRA |
| | | STEELKKNPSEDALVENNRLIVEHNAIIVENNRIIAAVLELIVRAIK |
| 643 | AHB2-10GS- | ELEEQVMHVLDQVSELAHELLHKLTGEELERAAYFNWWATEMMLELIKSDDEREIRE |
| | 1na0_int2- | IEEEARRILEHLEELARKGSGSGSGSGSEEAELAYLLGELAYKLGEYRIAIRAYRIA |
| | R3 | LKRDPNNAEAWYNLGNAYYKQGDYDEAIEYYQKALELDPNNAEAKQNLGNAKQKQG |
| 644 | AHB2-10GS- | ELEEQVMHVLDQVSELAHELLHKLTGEELERAAYFNWWATEMMLELIKSDDEREIRE |
| | 1na0_int2 | IEEEARRILEHLEELARKGSGSGSGSGSEEAELAYLLGELAYKLGEYRIAIRAYRIA |
| | | LKRDPNNAEAWYNLGNAYYKQGDYDEAIEYYQKALELDPNNAEAWYNLGNAYYKQGD |
| | | YDEAIEYYQKALELDPNNAEAKQNLGNAKQKQG |
| 645 | AHB2-4GS- | ELEEQVMHVLDQVSELAHELLHKLTGEELERAAYFNWWATEMMLELIKSDDEREIRE |
| | 1gcm | IEEEARRILEHLEELARKGSGSRMKQIEDKIEEILSKIYHIENEIARIKKLIGER |
| 646 | AHB2-8GS- | ELEEQVMHVLDQVSELAHELLHKLTGEELERAAYFNWWATEMMLELIKSDDEREIRE |
| | 1gcm | IEEEARRILEHLEELARKGSGSGSGSRMKQIEDKIEEILSKIYHIENEIARIKKLIG |
| | | ER |
| 647 | AHB2-4GS- | ELEEQVMHVLDQVSELAHELLHKLTGEELERAAYFNWWATEMMLELIKSDDEREIRE |
| | pRO-2-noHis | IEEEARRILEHLEELARKGSGSGSEYEIRKALEELKASTAELKRSTASLRASTEELK |
| | | KNPSEDALVENNRLIVENNAIIVENNRIIAAVLELIVRAIK |
| 648 | AHB2-8GS- | ELEEQVMHVLDQVSELAHELLHKLTGEELERAAYFNWWATEMMLELIKSDDEREIRE |
| | pRO-2-noHis | IEEEARRILEHLEELARKGSGSGSGSGSEYEIRKALEELKASTAELKRSTASLRAST |
| | | EELKKNPSEDALVENNRLIVENNAIIVENNRIIAAVLELIVRAIK |
| 649 | AHB2-6GS- | ELEEQVMHVLDQVSELAHELLHKLTGEELERAAYFNWWATEMMLELIKSDDEREIRE |
| | 1na0_3 | IEEEARRILEHLEELARKGSGSGSNLAEKMYKAGNAMYRKGQYTIAIIAYTLALLKD |
| | | PNNAEAWYNLGNAAYKKGEYDEAIEAYQKALELDPNNAEAWYNLGNAYYKQGDYDEA |
| | | IEYYQKALELDPNNAEAKQNLGNAKQKQG |
| 650 | AHB2-10GS- | ELEEQVMHVLDQVSELAHELLHKLTGEELERAAYFNWWATEMMLELIKSDDEREIRE |
| | 1na0_3 | IEEEARRILEHLEELARKGSGSGSGSGSNLAEKMYKAGNAMYRKGQYTIAIIAYTLA |
| | | LLKDPNNAEAWYNLGNAAYKKGEYDEAIEAYQKALELDPNNAEAWYNLGNAYYKQGD |
| | | YDEAIEYYQKALELDPNNAEAKQNLGNAKQKQG |
| 651 | AHB2-6GS- | ELEEQVMHVLDQVSELAHELLHKLTGEELERAAYFNWWATEMMLELIKSDDEREIRE |
| | 4pn9 | IEEEARRILEHLEELARKGSGSGSGEIAKSLKEIAKSLKEIAWSLKEIAKSLKG |
| 652 | AHB2-10GS- | ELEEQVMHVLDQVSELAHELLHKLTGEELERAAYFNWWATEMMLELIKSDDEREIRE |
| | 4pn9 | IEEEARRILEHLEELARKGSGSGSGSGSGEIAKSLKEIAKSLKEIAWSLKEIAKSLK |
| | | G |
| 653 | AHB2- | ELEEQVMHVLDQVSELAHELLHKLTGEELERAAYFNWWATEMMLELIKSDDEREIRE |
| | GGGGS5- | IEEEARRILEHLEELARKGGSGGEEAELAYLLGELAYKLGEYRIAIRAYRIALKRDP |
| | 1na0_int2- | NNAEAWYNLGNAYYKQGDYDEAIEYYQKALELDPNNAEAKQNLGNAKQKQG |
| | R3 | |
| 654 | AHB2- | ELEEQVMHVLDQVSELAHELLHKLTGEELERAAYFNWWATEMMLELIKSDDEREIRE |
| | GGGGS7- | IEEEARRILEHLEELARKGGGSGGGEEAELAYLLGELAYKLGEYRIAIRAYRIALKR |
| | 1na0_int2- | DPNNAEAWYNLGNAYYKQGDYDEAIEYYQKALELDPNNAEAKQNLGNAKQKQG |
| | R3 | |
| 655 | AHB2- | ELEEQVMHVLDQVSELAHELLHKLTGEELERAAYFNWWATEMMLELIKSDDEREIRE |
| | 1na0_int2- | IEEEARRILEHLEELARKGGGGSGGGGEEAELAYLLGELAYKLGEYRIAIRAYRIAL |
| | R3 | KRDPNNAEAWYNLGNAYYKQGDYDEAIEYYQKALELDPNNAEAKQNLGNAKQKQG |
| 656 | GGGGS9- | IEEEARRILEHLEELARKGGGGSGGGGEEAELAYLLGELAYKLGEYRIAIRAYRIAL |
| | AHB2- | ELEEQVMHVLDQVSELAHELLHKLTGEELERAAYFNWWATEMMLELIKSDDEREIRE |
| | GGGGS5- | IEEEARRILEHLEELARKGGSGGEEAELAYLLGELAYKLGEYRIAIRAYRIALKRDP |
| | 1na0_int2 | NNAEAWYNLGNAYYKQGDYDEAIEYYQKALELDPNNAEAWYNLGNAYYKQGDYDEAI |
| | | EYYQKALELDPNNAEAKQNLGNAKQKQG |
| 657 | AHB2- | ELEEQVMHVLDQVSELAHELLHKLTGEELERAAYFNWWATEMMLELIKSDDEREIRE |
| | GGGGS7- | IEEEARRILEHLEELARKGGGSGGGEEAELAYLLGELAYKLGEYRIAIRAYRIALKR |
| | 1na0_int2 | DPNNAEAWYNLGNAYYKQGDYDEAIEYYQKALELDPNNAEAWYNLGNAYYKQGDYDE |
| | | AIEYYQKALELDPNNAEAKQNLGNAKQKQG |
| 658 | AHB2- | ELEEQVMHVLDQVSELAHELLHKLTGEELERAAYFNWWATEMMLELIKSDDEREIRE |
| | GGGGS9- | IEEEARRILEHLEELARKGGGGSGGGGEEAELAYLLGELAYKLGEYRIAIRAYRIAL |
| | 1na0_int2 | KRDPNNAEAWYNLGNAYYKQGDYDEAIEYYQKALELDPNNAEAWYNLGNAYYKQGDY |
| | | DEAIEYYQKALELDPNNAEAKQNLGNAKQKQG |
| 659 | AHB2- | ELEEQVMHVLDQVSELAHELLHKLTGEELERAAYFNWWATEMMLELIKSDDEREIRE |
| | GGGGS5-6msr | IEEEARRILEHLEELARKGGSGGGSEYEIRKALEELKASTAELKRATASLRASTEEL |
| | | KKNPSEDALVENNRLIVEHNAIIVENNRIIAAVLELIVRAIK |
| 660 | AHB2- | ELEEQVMHVLDQVSELAHELLHKLTGEELERAAYFNWWATEMMLELIKSDDEREIRE |
| | GGGGS7-6msr | IEEEARRILEHLEELARKGGGSGGGGSEYEIRKALEELKASTAELKRATASLRASTE |
| | | ELKKNPSEDALVENNRLIVEHNAIIVENNRIIAAVLELIVRAIK |
| 661 | AHB2- | ELEEQVMHVLDQVSELAHELLHKLTGEELERAAYFNWWATEMMLELIKSDDEREIRE |
| | GGGGS9-6msr | IEEEARRILEHLEELARKGGGGSGGGGGSEYEIRKALEELKASTAELKRATASLRAS |
| | | TEELKKNPSEDALVENNRLIVEHNAIIVENNRIIAAVLELIVRAIK |
| 662 | AHB2- | ELEEQVMHVLDQVSELAHELLHKLTGEELERAAYFNWWATEMMLELIKSDDEREIRE |
| | GGGGS5-1gcm | IEEEARRILEHLEELARKGGSGGRMKQIEDKIEEILSKIYHIENEIARIKKLIGER |
| 663 | AHB2- | ELEEQVMHVLDQVSELAHELLHKLTGEELERAAYFNWWATEMMLELIKSDDEREIRE |
| | GGGGS7-1gcm | IEEEARRILEHLEELARKGGGSGGGRMKQIEDKIEEILSKIYHIENEIARIKKLIGE |
| | | R |
| 664 | AHB2- | ELEEQVMHVLDQVSELAHELLHKLTGEELERAAYFNWWATEMMLELIKSDDEREIRE |
| | GGGGS9-1gcm | IEEEARRILEHLEELARKGGGGSGGGGRMKQIEDKIEEILSKIYHIENEIARIKKLI |
| | | GER |
| 665 | AHB2- | ELEEQVMHVLDQVSELAHELLHKLTGEELERAAYFNWWATEMMLELIKSDDEREIRE |
| | GGGGS5-pRO- | IEEEARRILEHLEELARKGGSGGGSEYEIRKALEELKASTAELKRSTASLRASTEEL |
| | 2-noHis | KKNPSEDALVENNRLIVENNAIIVENNRIIAAVLELIVRAIK |
| 666 | AHB2- | IEEEARRILEHLEELARKGGSGGGSEYEIRKALEELKASTAELKRSTASLRASTEEL |
| | GGGGS7-pRO- | ELEEQVMHVLDQVSELAHELLHKLTGEELERAAYFNWWATEMMLELIKSDDEREIRE |
| | 2-noHis | IEEEARRILEHLEELARKGGGSGGGGSEYEIRKALEELKASTAELKRSTASLRASTE |
| | | ELKKNPSEDALVENNRLIVENNAIIVENNRIIAAVLELIVRAIK |
| 667 | AHB2- | ELEEQVMHVLDQVSELAHELLHKLTGEELERAAYFNWWATEMMLELIKSDDEREIRE |
| | GGGGS9-pRO- | IEEEARRILEHLEELARKGGGGSGGGGGSEYEIRKALEELKASTAELKRSTASLRAS |
| | 2-noHis | TEELKKNPSEDALVENNRLIVENNAIIVENNRIIAAVLELIVRAIK |
| 668 | AHB2- | ELEEQVMHVLDQVSELAHELLHKLTGEELERAAYFNWWATEMMLELIKSDDEREIRE |
| | GGGGS5- | IEEEARRILEHLEELARKGGSGGNLAEKMYKAGNAMYRKGQYTIAIIAYTLALLKDP |
| | 1na0_3 | NNAEAWYNLGNAAYKKGEYDEAIEAYQKALELDPNNAEAWYNLGNAYYKQGDYDEAI |
| | | EYYQKALELDPNNAEAKQNLGNAKQKQG |
| 669 | AHB2- | ELEEQVMHVLDQVSELAHELLHKLTGEELERAAYFNWWATEMMLELIKSDDEREIRE |
| | GGGGS7- | IEEEARRILEHLEELARKGGGSGGGNLAEKMYKAGNAMYRKGQYTIAIIAYTLALLK |
| | 1na0_3 | DPNNAEAWYNLGNAAYKKGEYDEAIEAYQKALELDPNNAEAWYNLGNAYYKQGDYDE |
| | | AIEYYQKALELDPNNAEAKQNLGNAKQKQG |
| 670 | AHB2- | ELEEQVMHVLDQVSELAHELLHKLTGEELERAAYFNWWATEMMLELIKSDDEREIRE |
| | GGGGS9- | IEEEARRILEHLEELARKGGGGSGGGGNLAEKMYKAGNAMYRKGQYTIAIIAYTLAL |
| | 1na0_3 | LKDPNNAEAWYNLGNAAYKKGEYDEAIEAYQKALELDPNNAEAWYNLGNAYYKQGDY |
| | | DEAIEYYQKALELDPNNAEAKQNLGNAKQKQG |
| 671 | AHB2- | ELEEQVMHVLDQVSELAHELLHKLTGEELERAAYFNWWATEMMLELIKSDDEREIRE |
| | GGGGS5-4pn9 | IEEEARRILEHLEELARKGGSGGGEIAKSLKEIAKSLKEIAWSLKEIAKSLKG |
| 672 | AHB2- | ELEEQVMHVLDQVSELAHELLHKLTGEELERAAYFNWWATEMMLELIKSDDEREIRE |
| | GGGGS7-4pn9 | IEEEARRILEHLEELARKGGGSGGGGEIAKSLKEIAKSLKEIAWSLKEIAKSLKG |
| 673 | AHB2- | ELEEQVMHVLDQVSELAHELLHKLTGEELERAAYFNWWATEMMLELIKSDDEREIRE |
| | GGGGS9-4pn9 | IEEEARRILEHLEELARKGGGGSGGGGGEIAKSLKEIAKSLKEIAWSLKEIAKSLKG |
| 674 | AHB2-2GS- | ELEEQVMHVLDQVSELAHELLHKLTGEELERAAYFNWWATEMMLELIKSDDEREIRE |
| | SB175 | IEEEARRILEHLEELARKGGSEALEELEKALRELKKSTDELERSTEELEKNPSEDAL |
| | | VENNRLIVENNKIIVEVLRIIAKVLK |
| 675 | AHB2-4GS- | ELEEQVMHVLDQVSELAHELLHKLTGEELERAAYFNWWATEMMLELIKSDDEREIRE |
| | SB175 | IEEEARRILEHLEELARKGGGSSEALEELEKALRELKKSTDELERSTEELEKNPSED |
| | | ALVENNRLIVENNKIIVEVLRIIAKVLK |
| 676 | AHB2-6GS- | ELEEQVMHVLDQVSELAHELLHKLTGEELERAAYFNWWATEMMLELIKSDDEREIRE |
| | SB175 | IEEEARRILEHLEELARKGGGGSGSEALEELEKALRELKKSTDELERSTEELEKNPS |
| | | EDALVENNRLIVENNKIIVEVLRIIAKVLK |
| 677 | AHB2-2GS- | ELEEQVMHVLDQVSELAHELLHKLTGEELERAAYFNWWATEMMLELIKSDDEREIRE |
| | SB175.1 | IEEEARRILEHLEELARKGGSPELEKALRELKKSTDELERSTEELEKNGSPEALVEN |
| | | NRLIVENNKIIVEVLRIIAK |
| 678 | AHB2-4GS- | ELEEQVMHVLDQVSELAHELLHKLTGEELERAAYFNWWATEMMLELIKSDDEREIRE |
| | SB175.1 | IEEEARRILEHLEELARKGGGSSPELEKALRELKKSTDELERSTEELEKNGSPEALV |
| | | ENNRLIVENNKIIVEVLRILAK |
| 679 | AHB2-6GS- | ELEEQVMHVLDQVSELAHELLHKLTGEELERAAYFNWWATEMMLELIKSDDEREIRE |
| | SB175.1 | IEEEARRILEHLEELARKGGGGSGSPELEKALRELKKSTDELERSTEELEKNGSPEA |
| | | LVENNRLIVENNKIIVEVLRILAK |
| 680 | AHB2-2GS- | ELEEQVMHVLDQVSELAHELLHKLTGEELERAAYFNWWATEMMLELIKSDDEREIRE |
| 41 | SB175.2 | IEEEARRILEHLEELARKGGSEKALRELKKSTDELERSTEELEKNGSPEALVENNRL |
| | | IVENNKIIVEVLR |
| 681 | AHB2-4GS- | ELEEQVMHVLDQVSELAHELLHKLTGEELERAAYFNWWATEMMLELIKSDDEREIRE |
| | SB175.2 | IEEEARRILEHLEELARKGGGSSEKALRELKKSTDELERSTEELEKNGSPEALVENN |
| | | RLIVENNKIIVEVLR |
| 682 | AHB2-6GS- | ELEEQVMHVLDQVSELAHELLHKLTGEELERAAYFNWWATEMMLELIKSDDEREIRE |
| | SB175.2 | IEEEARRILEHLEELARKGGGGSGSEKALRELKKSTDELERSTEELEKNGSPEALVE |
| | | NNRLIVENNKIIVEVLR |
| 683 | SB175-6GS- | SEALEELEKALRELKKSTDELERSTEELEKNPSEDALVENNRLIVENNKIIVEVLRI |
| | LCB1v2.2 | IAKVLKGGGGSGDKENVLQKIYEIMKELERLGHAEASMQVSDLIYEFMKTKDENLLE |
| | | EAERLLEEVKR |
| 684 | SB175-10GS- | SEALEELEKALRELKKSTDELERSTEELEKNPSEDALVENNRLIVENNKIIVEVLRI |
| | LCB1v2.2 | IAKVLKGGGGSGGGGSDKENVLQKIYEIMKELERLGHAEASMQVSDLIYEFMKTKDE |
| | | NLLEEAERLLEEVKR |
| 685 | SB175.1- | SPELEKALRELKKSTDELERSTEELEKNGSPEALVENNRLIVENNKIIVEVLRIIAK |
| | 6GS- | GGGGSGDKENVLQKIYEIMKELERLGHAEASMQVSDLIYEFMKTKDENLLEEAERLL |
| | LCB1v2.2 | EEVKR |
| 686 | SB175.1- | SPELEKALRELKKSTDELERSTEELEKNGSPEALVENNRLIVENNKIIVEVLRIIAK |
| | 10GS- | GGGGSGGGGSDKENVLQKIYEIMKELERLGHAEASMQVSDLIYEFMKTKDENLLEEA |
| | LCB1v2.2 | ERLLEEVKR |
| 687 | LCB3-8GS- | NLDELHMQMTDLVYEALHFAKDEEFQKHVFQLFEKATKAYKNKDRQKLEKVVEELKE |
| | SB175 | LLERLLSGGGGSGGGSEALEELEKALRELKKSTDELERSTEELEKNPSEDALVENNR |
| | | LIVENNKIIVEVLRIIAKVLK |
| 688 | LCB3-6GS- | NLDELHMQMTDLVYEALHFAKDEEFQKHVFQLFEKATKAYKNKDRQKLEKVVEELKE |
| | SB175 | LLERLLSGGGGSGSEALEELEKALRELKKSTDELERSTEELEKNPSEDALVENNRLI |
| | | VENNKIIVEVLRIIAKVLK |
| 689 | LCB3-4GS- | NLDELHMQMTDLVYEALHFAKDEEFQKHVFQLFEKATKAYKNKDRQKLEKVVEELKE |
| | SB175 | LLERLLSGGGSSEALEELEKALRELKKSTDELERSTEELEKNPSEDALVENNRLIVE |
| | | NNKIIVEVLRIIAKVLK |
| 690 | LCB3-2GS- | NLDELHMQMTDLVYEALHFAKDEEFQKHVFQLFEKATKAYKNKDRQKLEKVVEELKE |
| | SB175 | KIIVEVLRIIAKVLK |
| | | LLERLLSGGSEALEELEKALRELKKSTDELERSTEELEKNPSEDALVENNRLIVENN |
| 691 | AHB2v1-2GS- | ELEEQVMHVLDQVSELAHELLHKLTGEELERAAYFNWWATEMMLELIKSDDEREIRE |
| | SB175 | IEEEARRILEHLEELARKGGSEALEELEKALRELKKSTDELERSTEELEKNPSEDAL |
| | | VENNRLIVENNKIIVEVLRIIAKVLK |
| 692 | AHB2v2-2GS- | ELEEQVMHVLDQVSELAHELLHKLTGEELERAAYFNWWATEMMLELIKSDDEREIRE |
| | SB175 | IEEEAARILEHLEELARTGGSEALEELEKALRELKKSTDELERSTEELEKNPSEDAL |
| | | VENNRLIVENNKIIVEVLRIIAKVLK |

[0097] In some embodiments, the polypeptides comprise an amino acid sequence at least 50%, 55%, 60%, 65%, 70%, 75%, 80%, 85%, 90%, 91%, 92%, 93%, 94%, 95%, 96%, 97%, 98%, 99%, or 100% identical to the amino acid sequence of a genus selected from those recited in the middle column of Table 9. In these embodiments, X1, X2, X3 (when recited in the genus), and X4 (when recited in the genus) may be present or absent, and when present may be any sequence of 1 or more amino acids, as described above for embodiments listed in Table 8. In some embodiments, the optional domain that is present between monomer domains is present and may comprise an amino acid linker, as described above for embodiments listed in Table 8.

[0098] In another embodiment, the polypeptides comprise an amino acid sequence at least 50%, 55%, 60%, 65%, 70%, 75%, 80%, 85%, 90%, 91%, 92%, 93%, 94%, 95%, 96%, 97%, 98%, 99%, or 100% identical to an amino acid sequence comprising the amino acid sequence selected from the group consisting of SEQ ID NOS:693 to 701, wherein any N-terminal methionine residue may be absent or present, and wherein residues in parentheses may be present or absent (preferably absent) and are not considered in determining percent identity. In one embodiment, the N-terminal methionine residue is absent and the optional residues are absent.

TABLE 9

| Name | Sequence |
|---|---|
| C389_AHB2v1_ | MELEEQVMHVLDQVSELAHELLHKLTGEELERAAYFNWWATEMMLELIKSDDEREIREIEEEARR |
| 2GS-SB175 | ILEHLEELARKGGSEALEELEKALRELKKSTDELERSTEELEKNPSEDALVENNRLIVENNKIIV |
| | EVLRIIAKVLK (SEQ ID NO: 693) |
| AHB2v2_12PAS_ | MELEEQVMHVLDQVSELAHELLHKLTGEELERAAYFNWWATEMMLELIKSDDEREIREIEEEAAR |
| LCB3v2.2_12 | ILEHLEELARTGGASPAAPAPGGNLDELHMQMTDLVYEALHFAKDEEFQLHVFQLFEKATKAYKN |
| PAS_LCB1v2.2 | KDRQKLEKVVEELKELLERLLSGGASPAAPAPGGDKENVLQKIYEIMKELERLGHAEASMQVSDL |
| | IYEFMKTKDENLLEEAERLLEEVKR (SEQ ID NO: 694) |
| AHB2v2_24PAS_ | MELEEQVMHVLDQVSELAHELLHKLTGEELERAAYFNWWATEMMLELIKSDDEREIREIEEEAAR |
| LCB3v2.2_24 | ILEHLEELARTGGASPAAPAPASPAAPAPSAPAGGNLDELHMQMTDLVYEALHFAKDEEFQKHVF |
| PAS_LCB1v2.2 | QLFEKATKAYKNKDRQKLEKVVEELKELLERLLSGGASPAAPAPASPAAPAPSAPAGGDKENVLQ |
| | ILEHLEELARTGGASPAAPAPGGNLDELHMQMTDLVYEALHFAKDEEFQKHVFQLFEKATKAYKN |
| | KIYEIMKELERLGHAEASMQVSDLIYEFMKTKDENLLEEAERLLEEVKR (SEQ ID NO: 695) |
| C398_SB175_ | MELEEQVMHVLDQVSELAHELLHKLTGEELERAAYFNWWATEMMLELIKSDDEREIREIEEEARR |
| 6GS_LCB1v2.2 | ILEHLEELARKGGGSSEALEELEKALRELKKSTDELERSTEELEKNPSEDALVENNRLIVENNKI |
| | IVEVLRIIAKVLK (SEQ ID NO: 696) |
| AHB2v1_10GS_ | MELEEQVMHVLDQVSELAHELLHKLTGEELERAAYFNWWATEMMLELIKSDDEREIREIEEEARR |
| LCB3v2.2_ | ILEHLEELARKGGGSGGGSGGNLDELHMQMTDLVYEALHFAKDEEFQKHVFQLFEKATKAYKNKD |
| 10GS_LCB1v2.2 | RQKLEKVVEELKELLERLLSGGGSGGGSGGDKENVLQKIYEIMKELERLGHAEASMQVSDLIYEF |
| | MKTKDENLLEEAERLLEEVKR (SEQ ID NO: 697) |
| C390-AHB2v1- | MELEEQVMHVLDQVSELAHELLHKLTGEELERAAYFNWWATEMMLELIKSDDEREIREIEEEARR |
| 4GS-SB175 | ILEHLEELARKGGGSSEALEELEKALRELKKSTDELERSTEELEKNPSEDALVENNRLIVENNKI |
| | IVEVLRIIAKVLK (SEQ ID NO: 696) |
| C326-AHB2v1- | MELEEQVMHVLDQVSELAHELLHKLTGEELERAAYFNWWATEMMLELIKSDDEREIREIEEEARR |
| 4GS-1rfo | ILEHLEELARKGSGSGYIPEAPRDGQAYVRKDGEWVLLSTFL (SEQ ID NO: 698) |
| AHB2v1-10GS- | (MSHHHHHHHHSENLYFQSGG)ELEEQVMHVLDQVSELAHELLHKLTGEELERAAYFNWWATEMM |
| LCB3_v2.3- | LELIKSDDEREIREIEEEARRILEHLEELARKGGGSGGGSGGNIDELLMQVTDLIYEALHFAKDE |
| 10GS- | EFQKHAFQLFEKATKAYKNKDKQKLEKVVEELKELLERILSGGGSGGGSGGDKENVLQKIYEIMK |
| LCB1_v2.2 | ELERLGHAEASMQVSDLIYEFMKTKDENLLEEAERLLEEVKR (SEQ ID NO: 699) |
| with His Tev | |
| tag | |
| LCB1v3 with | (MSHHHHHHHHSENLYFQGGG)DKENILQKIYEIMKTLEQLGHAEASMQVSDLIYEFMKQGDER |
| His Tev tag | LLEEAERLLEEVER (SEQ ID NO: 700) |
| LCB1-Fc9 | DKENILQKIYEIMKTLDQLGHAEASMQVSDLIYEFMKQGDERLLEEAERLLEEVERGGSGSGGSGSGSG |
| With signal | GSEPKSSDKTHTCPPCPAPELLGGPSVFLFPPKPKDTLMISRTPEVTCVVVDVSHEDPEVKFNWYVDGV |
| sequence | EVHNAKTKPREEQYNSTYRVVSVLTVLHQDWLNGKEYKCKVSNKALPAPIEKTISKAKGQPREPQVYTL |
| leader | PPSRDELTKNQVSLTCLVKGFYPSDIAVEWESNGQPENNYKTTPPVLDSDGSFFLYSKLTVDKSRWQQG |
| removed | NVFSCSVMHEALHNHYTQKSLSLSPGK (SEQ ID NO: 701) |

[0099] The polypeptide of any embodiment or combination of embodiments described here may further be linked to a stabilization domain to promote increased residency time upon administration to a subject. Any suitable stabilization domain may be used for an intended purpose. Exemplary stabilization domains include, but are not limited to, polyethylene glycol (PEG), albumin, hydroxyethyl starch (HES), conformationally disordered polypeptide sequence composed of the amino acids Pro, Ala, and/or Ser (‘PASylation’), and/or a mucin diffusivity polypeptide composed of amino acids Lys and Ala, with or without Glu. Non-limiting embodiments of such mucin diffusivity polypeptides include, but are not limited to:

Mucin domain:
(SEQ ID NO: 61)
AKAKAKAKAKAKAKAKAKAKGG;
(SEQ ID NO: 62)
GGAKAKAKAKAKAKAKAKAKAK

[0100] Exemplary polypeptides of these embodiments may, for example, comprise an amino acid sequence at least 50%, 55%, 60%, 65%, 70%, 75%, 80%, 85%, 90%, 91%, 92%, 93%, 94%, 95%, 96%, 97%, 98%, 99%, or 100% identical to the amino acid sequence selected from the group consisting of SEQ ID NOS: 65-96, wherein in embodiments where a secretion signal is present (MARAWIFFLLCLAGRALA; SEQ ID NO:63) it can be replaced with any other secretion signal.

>Mucin_LCB1_v1.1_Cys_
AKAKAKAKAKAKAKAKAKAKGGDKENILQKIYEIMKTLDQLGHAEASMQVSDLIYEFMKQGDERLLEEAERLLEEVERC
(SEQ ID NO: 65)
>Mucin_LCB1_v1.3
AKAKAKAKAKAKAKAKAKAKGGDKENILQKIYEIMKTLEQLGHAEASMQVSDLIYEFMKQGDERLLEEAERLLEEVER (SEQ
ID NO: 66)
>LCB1 v1.3 Mucin
DKENILQKIYEIMKTLEQLGHAEASMQVSDLIYEFMKQGDERLLEEAERLLEEVERGGAKAKAKAKAKAKAKAKAKAK SEQ
ID NO: 67)
FC Fusions (Bold = Secretion Signal, underline = LCB, Yellow is the GS Linker,
Green is Fc)
>LCB1-Fc1 (BM40-LCB1-GS4-Fc-Opt-WT) (The LCB1 sequences = LCB1-1 of first provisional)
MARAWIFFLLCLAGRALADKEWILQKIYEIMRLLDELGHAEASMRVSDLIYEFMKKGDERLLEEAERLLEEVERGSGSEPKSS
DKTHTCPPCPAPELLGGPSVFLFPPKPKDTLMISRTPEVTCVVVDVSHEDPEVKFNWYVDGVEVHNAKTKPREEQYNSTYRVV
SVLTVLHQDWLNGKEYKCKVSNKALPAPIEKTISKAKGQPREPQVYTLPPSRDELTKNQVSLTCLVKGFYPSDIAVEWESNGQ
PENNYKTTPPVLDSDGSFFLYSKLTVDKSRWQQGNVFSCSVMHEALHNHYTQKSLSLSPGK (SEQ ID NO: 68)
>LCB1-Fc2 (BM40-LCB1-GS15-Fc-Opt-WT) (The LCB1 sequence = LCB1-1 of first provisional)
MARAWIFFLLCLAGRALADKEWILQKIYEIMRLLDELGHAEASMRVSDLIYEFMKKGDERLLEEAERLLEEVERGGSGSGGSG
SGSGGSEPKSSDKTHTCPPCPAPELLGGPSVFLFPPKPKDTLMISRTPEVTCVVVDVSHEDPEVKFNWYVDGVEVHNAKTKPR
EEQYNSTYRVVSVLTVLHQDWLNGKEYKCKVSNKALPAPIEKTISKAKGQPREPQVYTLPPSRDELTKNQVSLTCLVKGFYPS
DIAVEWESNGQPENNYKTTPPVLDSDGSFFLYSKLTVDKSRWQQGNVFSCSVMHEALHNHYTQKSLSLSPGK (SEQ ID
NO: 69)
>LCB1-Fc3 (BM40-Fc-Opt-GS15-2-LCB1-WT) (The LCB1 sequence = LCB1-1 of first provisional)
MARAWIFFLLCLAGRALAEPKSSDKTHTCPPCPAPELLGGPSVFLFPPKPKDTLMISRTPEVTCVVVDVSHEDPEVKFNWYVD
GVEVHNAKTKPREEQYNSTYRVVSVLTVLHQDWLNGKEYKCKVSNKALPAPIEKTISKAKGQPREPQVYTLPPSRDELTKNQV
SLTCLVKGFYPSDIAVEWESNGQPENNYKTTPPVLDSDGSFFLYSKLTVDKSRWQQGNVFSCSVMHEALHNHYTQKSLSLSPG
KSGGSGSGSGGSGSGS DKEWILQKIYEIMRLLDELGHAEASMRVSDLIYEFMKKGDERLLEEAERLLEEVER (SEQ ID
NO: 70)
>LCB1-Fc4 (BM40-LCB1-GS15-Fc-Opt-GS15-2-LCB1-WT) (The LCB1 sequences = LCB1-1 of
first provisional)
MARAWIFFLLCLAGRALADKEWILQKIYEIMRLLDELGHAEASMRVSDLIYEFMKKGDERLLEEAERLLEEVERGGSGSGGSG
SGSGGSEPKSSDKTHTCPPCPAPELLGGPSVFLFPPKPKDTLMISRTPEVTCVVVDVSHEDPEVKFNWYVDGVEVHNAKTKPR
EEQYNSTYRVVSVLTVLHQDWLNGKEYKCKVSNKALPAPIEKTISKAKGQPREPQVYTLPPSRDELTKNQVSLTCLVKGFYPS
DIAVEWESNGQPENNYKTTPPVLDSDGSFFLYSKLTVDKSRWQQGNVFSCSVMHEALHNHYTQKSLSLSPGKSGGSGSGSGGS
GSGSDKEWILQKIYEIMRLLDELGHAEASMRVSDLIYEFMKKGDERLLEEAERLLEEVER (SEQ ID NO: 71)
>LCB1-Fc5 (BM40-LCB1-GS4-Fc-Opt-Q38) (The LCB1 sequence = LCB1-3 of first provisional)
MARAWIFFLLCLAGRALADKEWILQKIYEIMRLLDELGHAEASMRVSDLIYEFMKQGDERLLEEAERLLEEVERGSGSEPKSS
DKTHTCPPCPAPELLGGPSVFLFPPKPKDTLMISRTPEVTCVVVDVSHEDPEVKFNWYVDGVEVHNAKTKPREEQYNSTYRVV
SVLTVLHQDWLNGKEYKCKVSNKALPAPIEKTISKAKGQPREPQVYTLPPSRDELTKNQVSLTCLVKGFYPSDIAVEWESNGQ
PENNYKTTPPVLDSDGSFFLYSKLTVDKSRWQQGNVFSCSVMHEALHNHYTQKSLSLSPGK (SEQ ID NO: 72)
>LCB1-Fc6 (BM40-LCB1-GS15-Fc-Opt-Q38) (The LCB1 sequence = LCB1-3 of first provisional)
MARAWIFFLLCLAGRALADKEWILQKIYEIMRLLDELGHAEASMRVSDLIYEFMKQGDERLLEEAERLLEEVERGGSGSGGSG
SGSGGSEPKSSDKTHTCPPCPAPELLGGPSVFLFPPKPKDTLMISRTPEVTCVVVDVSHEDPEVKFNWYVDGVEVHNAKTKPR
EEQYNSTYRVVSVLTVLHQDWLNGKEYKCKVSNKALPAPIEKTISKAKGQPREPQVYTLPPSRDELTKNQVSLTCLVKGFYPS
DIAVEWESNGQPENNYKTTPPVLDSDGSFFLYSKLTVDKSRWQQGNVFSCSVMHEALHNHYTQKSLSLSPGK (SEQ ID
NO: 73)
>LCB1-Fc7 (BM40-Fc-Opt-GS15-2-LCB1-Q38) (The LCB1 sequence = LCB1-3 of first provisional)
MARAWIFFLLCLAGRALAEPKSSDKTHTCPPCPAPELLGGPSVFLFPPKPKDTLMISRTPEVTCVVVDVSHEDPEVKFNWYVD
GVEVHNAKTKPREEQYNSTYRVVSVLTVLHQDWLNGKEYKCKVSNKALPAPIEKTISKAKGQPREPQVYTLPPSRDELTKNQV
SLTCLVKGFYPSDIAVEWESNGQPENNYKTTPPVLDSDGSFFLYSKLTVDKSRWQQGNVFSCSVMHEALHNHYTQKSLSLSPG
KSGGSGSGSGGSGSGSDKEWILQKIYEIMRLLDELGHAEASMRVSDLIYEFMKQGDERLLEEAERLLEEVER (SEQ ID
NO: 74)
>LCB1-Fc8 (BM40-LCB1-Q38-GS15-Fc-Opt-GS15-2-LCB1-Q38) (The LCB1 sequences = LCB1-3
of first provisional)
MARAWIFFLLCLAGRALADKEWILQKIYEIMRLLDELGHAEASMRVSDLIYEFMKQGDERLLEEAERLLEEVERGGSGSGGSG
SGSGGSEPKSSDKTHTCPPCPAPELLGGPSVFLFPPKPKDTLMISRTPEVTCVVVDVSHEDPEVKFNWYVDGVEVHNAKTKPR
EEQYNSTYRVVSVLTVLHQDWLNGKEYKCKVSNKALPAPIEKTISKAKGQPREPQVYTLPPSRDELTKNQVSLTCLVKGFYPS
DIAVEWESNGQPENNYKTTPPVLDSDGSFFLYSKLTVDKSRWQQGNVFSCSVMHEALHNHYTQKSLSLSPGKSGGSGSGSGGS
GSGSDKEWILQKIYEIMRLLDELGHAEASMRVSDLIYEFMKQGDERLLEEAERLLEEVER (SEQ ID NO: 75)
>LCB1-6M-Fc9 (BM40-LCB1-6M -4N, 14K, 15T, 18Q, 27Q, 38Q-GS15-Fc-Opt) (The LCB1
sequence = LCB1_v1.1 of this provisional)
MARAWIFFLLCLAGRALADKENILQKIYEIMKTLDQLGHAEASMQVSDLIYEFMKQGDERLLEEAERLLEEVERGGSGSGGSG
SGSGGSEPKSSDKTHTCPPCPAPELLGGPSVFLFPPKPKDTLMISRTPEVTCVVVDVSHEDPEVKFNWYVDGVEVHNAKTKPR
EEQYNSTYRVVSVLTVLHQDWLNGKEYKCKVSNKALPAPIEKTISKAKGQPREPQVYTLPPSRDELTKNQVSLTCLVKGFYPS
DIAVEWESNGQPENNYKTTPPVLDSDGSFFLYSKLTVDKSRWQQGNVFSCSVMHEALHNHYTQKSLSLSPGK (SEQ ID
NO: 76)
>LCB1-6M-Ngly-Fc10 (BM40-LCB1-6M-Ngly -4N, 14K, 15T, 18Q, 27N, 38Q-GS15-Fc-Opt) (The
LCB1 sequence = LCB1-5 of the original provisional = LCB1_v1.1 = LCB1-4 with N-link
Glycosylation)
MARAWIFFLLCLAGRALADKENILQKIYEIMKTLDQLGHAEASMNVSDLIYEFMKQGDERLLEEAERLLEEVERGGSGSGGSG
SGSGGSEPKSSDKTHTCPPCPAPELLGGPSVFLFPPKPKDTLMISRTPEVTCVVVDVSHEDPEVKFNWYVDGVEVHNAKTKPR
EEQYNSTYRVVSVLTVLHQDWLNGKEYKCKVSNKALPAPIEKTISKAKGQPREPQVYTLPPSRDELTKNQVSLTCLVKGFYPS
DIAVEWESNGQPENNYKTTPPVLDSDGSFFLYSKLTVDKSRWQQGNVFSCSVMHEALHNHYTQKSLSLSPGK (SEQ ID
NO: 77)
>LCB3-6M-Fc11 (BM40-LCB3-6M -8Q, 26Q, 28H, 35K, 37T, 43K-GS15-Fc-Opt) (LCB sequence is
the same as LCB3-3 of First Provisional)
MARAWIFFLLCLAGRALANDDELHMQMTDLVYEALHFAKDEEIQKHVFQLFEKATKAYKNKDRQKLEKVVEELKELLERLLSG
GSGSGGSGSGSGGSEPKSSDKTHTCPPCPAPELLGGPSVFLFPPKPKDTLMISRTPEVTCVVVDVSHEDPEVKFNWYVDGVEV
HNAKTKPREEQYNSTYRVVSVLTVLHQDWLNGKEYKCKVSNKALPAPIEKTISKAKGQPREPQVYTLPPSRDELTKNQVSLTC
LVKGFYPSDIAVEWESNGQPENNYKTTPPVLDSDGSFFLYSKLTVDKSRWQQGNVFSCSVMHEALHNHYTQKSLSLSPGK
(SEQ ID NO: 78)
>LCB3-6M-NGly-Fc12 (BM40-LCB3-6M-Ngly -8Q, 26Q, 28H, 35N, 37T, 43K-GS15-Fc-Opt) (LCB
sequence is the same as LCB3-4 of First Provisional which is LCB3-3 with N-link
Glycosylation)
MARAWIFFLLCLAGRALANDDELHMQMTDLVYEALHFAKDEEIQKHVFQLFENATKAYKNKDRQKLEKVVEELKELLERLLSG
GSGSGGSGSGSGGSEPKSSDKTHTCPPCPAPELLGGPSVFLFPPKPKDTLMISRTPEVTCVVVDVSHEDPEVKFNWYVDGVEV
HNAKTKPREEQYNSTYRVVSVLTVLHQDWLNGKEYKCKVSNKALPAPIEKTISKAKGQPREPQVYTLPPSRDELTKNQVSLTC
LVKGFYPSDIAVEWESNGQPENNYKTTPPVLDSDGSFFLYSKLTVDKSRWQQGNVFSCSVMHEALHNHYTQKSLSLSPGK
(SEQ ID NO: 79)
>LCB1-6M-GPGcP-Fc13 (BM40-LCB1-6M -4N, 14K, 15T, 18Q, 27Q, 38Q-GPGcP-Fc-Opt) (LCB
sequence is the same as LCB3-3 of First Provisional)
MARAWIFFLLCLAGRALADKENILQKIYEIMKTLDQLGHAEASMQVSDLIYEFMKQGDERLLEEAERLLEEVERAGSGGSGGS
GGSPVPSTPPTPSPSTPPTPSPSGGSGNSSGSGGSPVPSTPPTPSPSTPPTPSPSASEPKSSDKTHTCPPCPAPELLGGPSVF
LFPPKPKDTLMISRTPEVTCVVVDVSHEDPEVKFNWYVDGVEVHNAKTKPREEQYNSTYRVVSVLTVLHQDWLNGKEYKCKVS
NKALPAPIEKTISKAKGQPREPQVYTLPPSRDELTKNQVSLTCLVKGFYPSDIAVEWESNGQPENNYKTTPPVLDSDGSFFLY
SKLTVDKSRWQQGNVFSCSVMHEALHNHYTQKSLSLSPGK (SEQ ID NO: 80)
>LCB3-6M-GPGcP-Fc14 (BM40-LCB3-6M -8Q, 26Q, 28H, 35K, 37T, 43K-GPGcP-Fc-Opt) (LCB
sequence is the same as LCB3-3 of First Provisional)
MARAWIFFLLCLAGRALANDDELHMQMTDLVYEALHFAKDEEIQKHVFQLFEKATKAYKNKDRQKLEKVVEELKELLERLLSA
GSGGSGGSGGSPVPSTPPTPSPSTPPTPSPSGGSGNSSGSGGSPVPSTPPTPSPSTPPTPSPSASEPKSSDKTHTCPPCPAPE
LLGGPSVFLFPPKPKDTLMISRTPEVTCVVVDVSHEDPEVKFNWYVDGVEVHNAKTKPREEQYNSTYRVVSVLTVLHQDWLNG
KEYKCKVSNKALPAPIEKTISKAKGQPREPQVYTLPPSRDELTKNQVSLTCLVKGFYPSDIAVEWESNGQPENNYKTTPPVLD
SDGSFFLYSKLTVDKSRWQQGNVFSCSVMHEALHNHYTQKSLSLSPGK (SEQ ID NO: 81)
>LCB1-6M-GS30-Fc15 (BM40-LCB1-6M -4N, 14K, 15T, 18Q, 27Q, 38Q-GS30-Fc-Opt) LCB1-4
MARAWIFFLLCLAGRALADKENILQKIYEIMKTLDQLGHAEASMQVSDLIYEFMKQGDERLLEEAERLLEEVERGGGSGGGGS
GGGGSGGGGSGGGGSGGGGSGEPKSSDKTHTCPPCPAPELLGGPSVFLFPPKPKDTLMISRTPEVTCVVVDVSHEDPEVKFNW
YVDGVEVHNAKTKPREEQYNSTYRVVSVLTVLHQDWLNGKEYKCKVSNKALPAPIEKTISKAKGQPREPQVYTLPPSRDELTK
NQVSLTCLVKGFYPSDIAVEWESNGQPENNYKTTPPVLDSDGSFFLYSKLTVDKSRWQQGNVFSCSVMHEALHNHYTQKSLSL
SPGK (SEQ ID NO: 82)
>LCB3-6M-GS30-Fc16 (BM40-LCB3-6M -8Q, 26Q, 28H, 35K, 37T, 43K-GS30-Fc-Opt) (LCB
sequence is the same as LCB3-3 of First Provisional)
MARAWIFFLLCLAGRALANDDELHMQMTDLVYEALHFAKDEEIQKHVFQLFEKATKAYKNKDRQKLEKVVEELKELLERLLSG
GGSGGGGSGGGGSGGGGSGGGGSGGGGSGEPKSSDKTHTCPPCPAPELLGGPSVFLFPPKPKDTLMISRTPEVTCVVVDVSHE
DPEVKFNWYVDGVEVHNAKTKPREEQYNSTYRVVSVLTVLHQDWLNGKEYKCKVSNKALPAPIEKTISKAKGQPREPQVYTLP
PSRDELTKNQVSLTCLVKGFYPSDIAVEWESNGQPENNYKTTPPVLDSDGSFFLYSKLTVDKSRWQQGNVFSCSVMHEALHNH
YTQKSLSLSPGK (SEQ ID NO: 83)
>LCB1-v1.3-Fc17 (BM40-LCB1-v1.3 -4N, 14K, 15T, 17E, 18Q, 27Q, 38Q-GS15-Fc-Opt)
MARAWIFFLLCLAGRALADKENILQKIYEIMKTLEQLGHAEASMQVSDLIYEFMKQGDERLLEEAERLLEEVERGGSGSGGSG
SGSGGSEPKSSDKTHTCPPCPAPELLGGPSVFLFPPKPKDTLMISRTPEVTCVVVDVSHEDPEVKFNWYVDGVEVHNAKTKPR
EEQYNSTYRVVSVLTVLHQDWLNGKEYKCKVSNKALPAPIEKTISKAKGQPREPQVYTLPPSRDELTKNQVSLTCLVKGFYPS
DIAVEWESNGQPENNYKTTPPVLDSDGSFFLYSKLTVDKSRWQQGNVFSCSVMHEALHNHYTQKSLSLSPGK (SEQ ID
NO: 84)
>LCB1-v1.3-Ngly-Fc18 (BM40-LCB1-v1.3 Ngly -4N, 14K, 15T, 17E, 18Q, 27N, 38Q-GS15-Fc-
Opt) (>LCB1_v1.5 (= LCB1_v1.3 with N-link Glycosylation)
MARAWIFFLLCLAGRALADKENILQKIYEIMKTLEQLGHAEASMNVSDLIYEFMKQGDERLLEEAERLLEEVERGGSGSGGSG
SGSGGSEPKSSDKTHTCPPCPAPELLGGPSVFLFPPKPKDTLMISRTPEVTCVVVDVSHEDPEVKFNWYVDGVEVHNAKTKPR
EEQYNSTYRVVSVLTVLHQDWLNGKEYKCKVSNKALPAPIEKTISKAKGQPREPQVYTLPPSRDELTKNQVSLTCLVKGFYPS
DIAVEWESNGQPENNYKTTPPVLDSDGSFFLYSKLTVDKSRWQQGNVFSCSVMHEALHNHYTQKSLSLSPGK (SEQ ID
NO: 85)
>LCB1-v1.3-GPGcP-Fc19 (BM40-LCB1-v1.3-Fc19 -4N, 14K, 15T, 17E, 18Q, 27Q, 38Q-GPGcP-Fc-
Opt)
MARAWIFFLLCLAGRALADKENILQKIYEIMKTLEQLGHAEASMQVSDLIYEFMKQGDERLLEEAERLLEEVERAGSGGSGGS
GGSPVPSTPPTPSPSTPPTPSPSGGSGNSSGSGGSPVPSTPPTPSPSTPPTPSPSASEPKSSDKTHTCPPCPAPELLGGPSVF
LFPPKPKDTLMISRTPEVTCVVVDVSHEDPEVKFNWYVDGVEVHNAKTKPREEQYNSTYRVVSVLTVLHQDWLNGKEYKCKVS
NKALPAPIEKTISKAKGQPREPQVYTLPPSRDELTKNQVSLTCLVKGFYPSDIAVEWESNGQPENNYKTTPPVLDSDGSFFLY
SKLTVDKSRWQQGNVFSCSVMHEALHNHYTQKSLSLSPGK (SEQ ID NO: 86)
>LCB1-v1.3-GS30-Fc20 (BM40-LCB1-v1.3 -4N, 14K, 15T, 17E, 18Q, 27Q, 38Q -GS30-Fc-Opt)
MARAWIFFLLCLAGRALADKENILQKIYEIMKTLEQLGHAEASMQVSDLIYEFMKQGDERLLEEAERLLEEVERGGGSGGGGS
GGGGSGGGGSGGGGSGGGGSGEPKSSDKTHTCPPCPAPELLGGPSVFLFPPKPKDTLMISRTPEVTCVVVDVSHEDPEVKFNW
YVDGVEVHNAKTKPREEQYNSTYRVVSVLTVLHQDWLNGKEYKCKVSNKALPAPIEKTISKAKGQPREPQVYTLPPSRDELTK
NQVSLTCLVKGFYPSDIAVEWESNGQPENNYKTTPPVLDSDGSFFLYSKLTVDKSRWQQGNVFSCSVMHEALHNHYTQKSLSL
SPGK (SEQ ID NO: 87)
Fc21-LCB1v2.2-FcIgG1_WT
MARAWIFFLLCLAGRALADKENVLQKIYEIMKELERLGHAEASMQVSDLIYEFMKTKDENL
LEEAERLLEEVKRGGSGSGGSGSGSGGSEPKSSDKTHTCPPCPAPELLGGPSVFLFPPKPK
DTLMISRTPEVTCVVVDVSHEDPEVKFNWYVDGVEVHNAKTKPREEQYNSTYRVVSVLTVL
HQDWLNGKEYKCKVSNKALPAPIEKTISKAKGQPREPQVYTLPPSRDELTKNQVSLTCLVK
GFYPSDIAVEWESNGQPENNYKTTPPVLDSDGSFFLYSKLTVDKSRWQQGNVFSCSVMHEA
LHNHYTQKSLSLSPGK (SEQ ID NO: 88)
Fc22-LCB1v2.2-FcIgG3_WT
MARAWIFFLLCLAGRALANIDELLMQVTDLIYEALHFAKDEEFQKHAFQLFEKATKAYKNK
LEEAERLLEEVKRGGSGSGGSGSGSGGSEPKSSDKTHTCPRCPAPELLGGPSVFLFPPKPK
DTLMISRTPEVTCVVVDVSHEDPEVQFKWYVDGVEVHNAKTKPREEQFNSTFRVVSVLTVL
HQDWLNGKEYKCKVSNKALPAPIEKTISKTKGQPREPQVYTLPPSREEMTKNQVSLTCLVK
GFYPSDIAVEWESSGQPENNYNTTPPMLDSDGSFFLYSKLTVDKSRWQQGNIFSCSVMHEA
LHNRFTQKSLSLSPGK (SEQ ID NO: 89)
Fc23_LCB3_v2.3-10GS-LCB1_v2.2_FcIgG1_WT
MARAWIFFLLCLAGRALANIDELLMQVTLDIYEALHFAKDEEFQKHAFQLFEKATKAYKNK
LIYEFMKTKDENLLEEAERLLEEVKRGGSGSGGSGSGSGGSEPKSSDKTHTCPPCPAPELL
GGPSVFLFPPKPKDTLMISRTPEVTCVVVDVSHEDPEVKFNWYVDGVEVHNAKTKPREEQY
NSTYRVVSVLTVLHQDWLNGKEYKCKVSNKALPAPIEKTISKAKGQPREPQVYTLPPSRDE
LTKNQVSLTCLVKGFYPSDIAVEWESNGQPENNYKTTPPVLDSDGSFFLYSKLTVDKSRWQ
QGNVFSCSVMHEALHNHYTQKSLSLSPGK (SEQ ID NO: 90)
Fc2_AHB2-10GS-LCB3_v2.3-10GS-LCB1_v2.2_FcIgG1_WT
MARAWIFFLLCLAGRALAELEEQVMHVLDQVSELAHELLHKLTGEELERAAYFNWWATEMM
LELIKSDDEREIREIEEEARRILEHLEELARKGGGSGGGSGGNIDELLMQVTDLIYEALHF
AKDEEFQKHAFQLFEKATKAYKNKDKQKLEKVVEELKELLERILSGGGSGGGSGGDKENVL
QKIYEIMKELERLGHAEASMQVSDLIYEFMKTKDENLLEEAERLLEEVKRGGSGSGGSGSG
SGGSEPKSSDKTHTCPPCPAPELLGGPSVFLFPPKPKDTLMISRTPEVTCVVVDVSHEDPE
VKFNWYVDGVEVHNAKTKPREEQYNSTYRVVSVLTVLHQDWLNGKEYKCKVSNKALPAPIE
KTISKAKGQPREPQVYTLPPSRDELTKNQVSLTCLVKGFYPSDIAVEWESNGQPENNYKTT
PPVLDSDGSFFLYSKLTVDKSRWQQGNVFSCSVMHEALHNHYTQKSLSLSPGK (SEQ ID
NO: 91)
Fc25_LCB3_v2.3-10GS-AHB2-10GS-LCB1_v2.2_FcIgG1_WT
MARAWIFFLLCLAGRALANIDELLMQVTDLIYEALHFAKDEEFQKHAFQLFEKATKAYKNK
DKQKLEKVVEELKELLERILSGGGSGGGSGGELEEQVMHVLDQVSELAHELLHKLTGEELE
RAAYFNWWATEMMLELIKSDDEREIREIEEEARRILEHLEELARKGGGSGGGSGGDKENVL
SGGSEPKSSDKTHTCPPCPAPELLGGPSVFLFPPKPKDTLMISRTPEVTCVVVDVSHEDPE
VKFNWYVDGVEVHNAKTKPREEQYNSTYRVVSVLTVLHQDWLNGKEYKCKVSNKALPAPIE
KTISKAKGQPREPQVYTLPPSRDELTKNQVSLTCLVKGFYPSDIAVEWESNGQPENNYKTT
PPVLDSDGSFFLYSKLTVDKSRWQQGNVFSCSVMHEALHNHYTQKSLSLSPGK (SEQ ID
NO: 92)
Fc26_LCB3_v2.3-10GS-LCB1_v2.2_FcIgG1_GA
MARAWIFFLLCLAGRALANIDELLMQVTDLIYEALHFAKDEEFQKHAFQLFEKATKAYKNK
LIYEFMKTKDENLLEEAERLLEEVKRGGSGSGGSGSGSGGSEPKSSDKTHTCPPCPAPELL
AGPSVFLFPPKPKDTLMISRTPEVTCVVVDVSHEDPEVKFNWYVDGVEVHNAKTKPREEQY
NSTYRVVSVLTVLHQDWLNGKEYKCKVSNKALPAPIEKTISKAKGQPREPQVYTLPPSRDE
LTKNQVSLTCLVKGFYPSDIAVEWESNGQPENNYKTTPPVLDSDGSFFLYSKLTVDKSRWQ
QGNVFSCSVMHEALHNHYTQKSLSLSPGK (SEQ ID NO: 93)
Fc27_LCB3_v2.3-10GS-LCB1_v2.2_FcIgG1_GRLR
MARAWIFFLLCLAGRALANIDELLMQVTDLIYEALHFAKDEEFQKHAFQLFEKATKAYKNK
DKQKLEKVVEELKELLERILSGGGSGGGSGGDKENVLQKIYEIMKELERLGHAEASMQVSD
LIYEFMKTKDENLLEEAERLLEEVKRGGSGSGGSGSGSGGSEPKSSDKTHTCPPCPAPELL
RGPSVFLFPPKPKDTLMISRTPEVTCVVVDVSHEDPEVKFNWYVDGVEVHNAKTKPREEQY
NSTYRVVSVLTVLHQDWLNGKEYKCKVSNKARPAPIEKTISKAKGQPREPQVYTLPPSRDE
LTKNQVSLTCLVKGFYPSDIAVEWESNGQPENNYKTTPPVLDSDGSFFLYSKLTVDKSRWQ
QGNVFSCSVMHEALHNHYTQKSLSLSPGK (SEQ ID NO: 94)
Fc28_LCB3_v2.3-10GS-LCB1_v2.2_FcIgG1_GAALIE
MARAWIFFLLCLAGRALANIDELLMQVTDLIYEALHFAKDEEFQKHAFQLFEKATKAYKNK
LIYEFMKTKDENLLEEAERLLEEVKRGGSGSGGSGSGSGGSEPKSSDKTHTCPPCPAPELL
AGPSVFLFPPKPKDTLMISRTPEVTCVVVDVSHEDPEVKFNWYVDGVEVHNAKTKPREEQY
NSTYRVVSVLTVLHQDWLNGKEYKCKVSNKALPLPEEKTISKAKGQPREPQVYTLPPSRDE
LTKNQVSLTCLVKGFYPSDIAVEWESNGQPENNYKTTPPVLDSDGSFFLYSKLTVDKSRWQ
QGNVFSCSVMHEALHNHYTQKSLSLSPGK (SEQ ID NO: 95)
Fc29_LCB3_v2.3-10GS-LCB1_v2.2_FcIgG1_GAALIELS
MARAWIFFLLCLAGRALANIDELLMQVTDLIYEALHFAKDEEFQKHAFQLFEKATKAYKNK
DKQKLEKVVEELKELLERILSGGGSGGGSGGDKENVLQKIYEIMKELERLGHAEASMQVSD
LIYEFMKTKDENLLEEAERLLEEVKRGGSGSGGSGSGSGGSEPKSSDKTHTCPPCPAPELL
AGPSVFLFPPKPKDTLMISRTPEVTCVVVDVSHEDPEVKFNWYVDGVEVHNAKTKPREEQY
NSTYRVVSVLTVLHQDWLNGKEYKCKVSNKALPLPEEKTISKAKGQPREPQVYTLPPSRDE
LTKNQVSLTCLVKGFYPSDIAVEWESNGQPENNYKTTPPVLDSDGSFFLYSKLTVDKSRWQ
QGNVFSCSVLHEALHSHYTQKSLSLSPGK (SEQ ID NO: 96)

[0101] The disclosure further provides oligomers of the polypeptide of any embodiment or combination of embodiments herein. In one embodiment, the oligomers are oligomers of polypeptides disclosed herein that comprise oligomerization domains. In one embodiment, the oligomer comprises a trimer, including but not limited to a homotrimer.

[0102] In another embodiment, the disclosure provides compositions, comprising 2, 3, 4, or more copies of the polypeptide of any embodiment or combination of embodiments herein attached to a support, including but not limited to a polypeptide particle support, such as a nanoparticle or virus like particle.

[0103] As disclosed herein, the polypeptides bind to the SARS-COV-2 Spike glycoprotein, and thus are useful (for example), as therapeutics to treat SARS-COV-2 infection. In one embodiment, the polypeptides bind to the SARS-COV-2 Spike glycoprotein with an affinity of at least 10 nM, measured as described in the attached examples.

[0104] In another aspect, the disclosure provides nucleic acids encoding a polypeptide of the disclosure. The nucleic acid sequence may comprise RNA (such as mRNA) or DNA. Such nucleic acid sequences may comprise additional sequences useful for promoting expression and/or purification of the encoded protein, including but not limited to polyA sequences, modified Kozak sequences, and sequences encoding epitope tags, export signals, and secretory signals, nuclear localization signals, and plasma membrane localization signals. It will be apparent to those of skill in the art, based on the teachings herein, what nucleic acid sequences will encode the proteins of the invention.

[0105] In another aspect, the disclosure provides expression vectors comprising the nucleic acid of any embodiment or combination of embodiments of the disclosure operatively linked to a suitable control sequence. “Expression vector” includes vectors that operatively link a nucleic acid coding region or gene to any control sequences capable of effecting expression of the gene product. “Control sequences” operably linked to the nucleic acid sequences of the disclosure are nucleic acid sequences capable of effecting the expression of the nucleic acid molecules. The control sequences need not be contiguous with the nucleic acid sequences, so long as they function to direct the expression thereof. Thus, for example, intervening untranslated yet transcribed sequences can be present between a promoter sequence and the nucleic acid sequences and the promoter sequence can still be considered “operably linked” to the coding sequence. Other such control sequences include, but are not limited to, polyadenylation signals, termination signals, and ribosome binding sites. Such expression vectors can be of any type known in the art, including but not limited to plasmid and viral-based expression vectors. The control sequence used to drive expression of the disclosed nucleic acid sequences in a mammalian system may be constitutive (driven by any of a variety of promoters, including but not limited to, CMV, SV40, RSV, actin, EF) or inducible (driven by any of a number of inducible promoters including, but not limited to, tetracycline, ecdysone, steroid-responsive).

[0106] In one aspect, the present disclosure provides cells comprising the polypeptide, the composition, the nucleic acid, and/or the expression vector of any embodiment or combination of embodiments of the disclosure, wherein the cells can be either prokaryotic or eukaryotic, such as mammalian cells. In one embodiment the cells may be transiently or stably transfected with the nucleic acids or expression vectors of the disclosure. Such transfection of expression vectors into prokaryotic and eukaryotic cells can be accomplished via any technique known in the art. A method of producing a polypeptide according to the invention is an additional part of the invention. The method comprises the steps of (a) culturing a host according to this aspect of the invention under conditions conducive to the expression of the polypeptide, and (b) optionally, recovering the expressed polypeptide. In other embodiments, the polypeptides may be produced via any other suitable technique, including but not limited to using cell-free protein synthesis (or in vitro transcription and translation).

[0107] In another aspect, the disclosure provides pharmaceutical compositions/vaccines comprising

[0108] (a) the polypeptide, the nucleic acid, the expression vector, and/or the host cell of any embodiment or combination of embodiments herein; and

[0109] (b) a pharmaceutically acceptable carrier.

[0110] The compositions may further comprise (a) a lyoprotectant; (b) a surfactant; (c) a bulking agent; (d) a tonicity adjusting agent; (e) a stabilizer; (f) a preservative and/or (g) a buffer. In some embodiments, the buffer in the pharmaceutical composition is a Tris buffer, a histidine buffer, a phosphate buffer, a citrate buffer or an acetate buffer. The composition may also include a lyoprotectant, e.g. sucrose, sorbitol or trehalose. In certain embodiments, the composition includes a preservative e.g. benzalkonium chloride, benzethonium, chlorohexidine, phenol, m-cresol, benzyl alcohol, methylparaben, propylparaben, chlorobutanol, o-cresol, p-cresol, chlorocresol, phenylmercuric nitrate, thimerosal, benzoic acid, and various mixtures thereof. In other embodiments, the composition includes a bulking agent, like glycine. In yet other embodiments, the composition includes a surfactant e.g., polysorbate-20, polysorbate-40, polysorbate-60, polysorbate-65, polysorbate-80 polysorbate-85, poloxamer-188, sorbitan monolaurate, sorbitan monopalmitate, sorbitan monostearate, sorbitan monooleate, sorbitan trilaurate, sorbitan tristearate, sorbitan trioleaste, or a combination thereof. The composition may also include a tonicity adjusting agent, e.g., a compound that renders the formulation substantially isotonic or isoosmotic with human blood. Exemplary tonicity adjusting agents include sucrose, sorbitol, glycine, methionine, mannitol, dextrose, inositol, sodium chloride, arginine and arginine hydrochloride. In other embodiments, the composition additionally includes a stabilizer, e.g., a molecule which substantially prevents or reduces chemical and/or physical instability of the nanostructure, in lyophilized or liquid form. Exemplary stabilizers include sucrose, sorbitol, glycine, inositol, sodium chloride, methionine, arginine, and arginine hydrochloride.

[0111] The polypeptide, the nucleic acid, the expression vector, and/or the host cell may be the sole active agent in the composition, or the composition may further comprise one or more other agents suitable for an intended use.

[0112] In a further aspect, the disclosure provides methods for treating a severe acute respiratory syndrome (SARS) coronavirus infection (including SARS-Co-V and SARS-COV-2), comprising administering to a subject in need thereof an amount of the polypeptide, the nucleic acid, the expression vector, the host cell, the oligomer, the composition, and/or the pharmaceutical composition of any of the preceding claims, effective to treat the infection. In one embodiment, the SARS coronavirus comprises SARS-COV-2.

[0113] In another aspect, the disclosure provides methods for limiting development of a severe acute respiratory syndrome (SARS) coronavirus infection (including SARS-Co-V and SARS-COV-2), comprising administering to a subject in need thereof an amount of the polypeptide, the nucleic acid, the expression vector, the host cell, the oligomer, the composition, and/or the pharmaceutical composition of any of the preceding claims, effective to treat the infection. In one embodiment, the SARS coronavirus comprises SARS-COV-2.

[0114] The polypeptide, the nucleic acid, the expression vector, the host cell, and/or the pharmaceutical composition may be administered via any suitable administrative route as deemed appropriate by attending medical personnel. In one embodiment, the polypeptide, the nucleic acid, the expression vector, the host cell, the oligomer, the composition, and/or the pharmaceutical composition is administered intra-nasally. In another embodiment, the polypeptide, the nucleic acid, the expression vector, the host cell, the oligomer, the composition, and/or the pharmaceutical composition is administered systemically.

[0115] When the method comprises treating a SARS coronavirus infection, the one or more polypeptides, nucleic acids, expression vectors, host cells, and/or pharmaceutical compositions are administered to a subject that has already been diagnosed as having a SARS coronavirus infection. As used herein, “treat” or “treating” means accomplishing one or more of the following: (a) reducing severity of symptoms of the infection in the subject; (b) limiting increase in symptoms in the subject; (c) increasing survival; (d) decreasing the duration of symptoms; (e) limiting or preventing development of symptoms; and (f) decreasing the need for hospitalization and/or the length of hospitalization for treating the infection.

[0116] When the method comprises limiting development of SARS coronavirus infection, the one or more polypeptides, nucleic acids, expression vectors, host cells, and/or pharmaceutical compositions are administered prophylactically to a subject that is not known to have a SARS coronavirus infection, but may be at risk of such an infection. As used herein, “limiting” means to limit development of a SARS coronavirus infection in subjects at risk of such infection, which may be any subject.

[0117] The subject may be any subject, such as a human subject

[0118] Exemplary symptoms of SARS-COV-2 infection include, but are not limited to, fever, fatigue, cough, shortness of breath, chest pressure and/or pain, loss or diminution of the sense of smell, loss or diminution of the sense of taste, and respiratory issues including but not limited to pneumonia, bronchitis, severe acute respiratory syndrome (SARS), and upper and lower respiratory tract infections.

[0119] As used herein, an “effective amount” refers to an amount of the composition that is effective for treating and/or limiting SARS-COV-2 infection. The polypeptide, composition, nucleic acid, or composition of any embodiment herein are typically formulated as a pharmaceutical composition, such as those disclosed above, and can be administered via any suitable route, including orally, parentally, by inhalation spray, rectally, or topically in dosage unit formulations containing conventional pharmaceutically acceptable carriers, adjuvants, and vehicles. The term parenteral as used herein includes, subcutaneous, intravenous, intra-arterial, intramuscular, intrasternal, intratendinous, intraspinal, intracranial, intrathoracic, infusion techniques or intraperitoneally. Polypeptide compositions may also be administered via microspheres, liposomes, immune-stimulating complexes (ISCOMs), or other microparticulate delivery systems or sustained release formulations introduced into suitable tissues (such as blood). Dosage regimens can be adjusted to provide the optimum desired response (e.g., a therapeutic or prophylactic response). A suitable dosage range may, for instance, be 0.1 μg/kg-100 mg/kg body weight of the polypeptide or nanoparticle thereof. The composition can be delivered in a single bolus, or may be administered more than once (e.g., 2, 3, 4, 5, or more times) as determined by attending medical personnel.

[0120] The disclosure also provides methods for designing polypeptides that bind to the receptor binding site (RBD) of SARS-Cov-2, wherein the methods comprise steps as described in the examples that follow. Such methods may comprise the steps of polypeptide design (as described in any embodiment or combination of embodiments in the examples), cell-free synthesis, and evaluation for SARS-Cov-2 RBD binding using any suitable technique.

### EXAMPLES

### Summary

[0121] Effective therapeutics for SARS-COV-2 are needed. We sought to use computational protein design to generate high affinity binders to the receptor binding site (RBD) of SARS-Cov-2 that block the interaction with the Ace2 receptor required for cell entry. We generated small protein scaffolds with shape complementary to the Ace2 binding site on the RBD using two strategies: first, scaffolds were built around the helix in Ace2 that makes the majority of the interactions with the RBD, and second, diverse de novo designed scaffolds less than 65 residues in length were docked against this region. In both cases, the scaffold residues at the RBD interface were then optimized for high affinity binding and those in the remainder of the protein, for folding to the target structure and stability. The 50,000 designs predicted to bind most strongly to the virus were encoded in large oligonucleotide arrays, and screened using yeast surface display for binding to the RBD with fluorescence activated cell sorting; deep sequencing of the population before and after sorting identified hundreds of designs that bind the target. The binding modes of the highest affinity (most enriched by sorting) binders were confirmed by high resolution sequence mapping, and the affinities were further increased by combining 1-4 beneficial substitutions. Eight of the optimized designs with different binding sites surrounding the Ace2 interface on the RBD, and completely different sequences, were found to express at high levels in E coli, and to bind the RBD with Kd's ranging from 100 pM to 10 nM. The designs blocked infection of vero-6 cells by live virus with IC50's ranging from 10 nM to 20 pM. The polypeptides are thus useful, for example, in both intra-nasal and systemic SARS-COV-2 therapeutics, and, more generally, our results demonstrate the power of computational protein design for rapidly generating potential therapeutic candidates against pandemic threats.

[0122] SARS-COV-2 infection is thought to often start in the nose, with virus replicating there for several before spreading to the broader respiratory system. Delivery of a high concentration of a viral inhibitor into the nose and into the respiratory system generally could therefore potentially provide prophylactic protection, and therapeutic efficacy early in infection, and could be particularly useful for health care workers and others coming into frequent contact with infected individuals. A number of monoclonal antibodies are in development as systemic SARS-COV-2 therapeutics, but these compounds are not ideal for intranasal delivery as antibodies are large and often not extremely stable molecules, and the density of binding sites is low (two per 150 Kd antibody); the Fc domain provides little added benefit. More desirable would be protein inhibitory with the very high affinity for the virus of the monoclonals, but with higher stability and very much smaller size to maximize the density of inhibitory domains and enable direct delivery into the respiratory system through nebulization.

[0123] We set out to de novo design high affinity binders to the RBD that compete with Ace2 binding. We explored two strategies: first we attempted to scaffold the alpha helix in Ace2 that makes the majority of the interactions with the RBD in a small designed protein that makes additional interactions with the RBD to attain higher affinity, and second, we sought to design binders completely from scratch that do not incorporate any known binding interaction with the RBD. An advantage of the second approach is that the range of possibilities for design is much larger, and so potentially higher affinity binding modes can be identified. For the first approach, we used the Rosetta™ blue print builder to generate small proteins which incorporate the Ace2 helix and for the second approach, RIF docking and design using large miniprotein libraries. The designs interact with distinct regions of the RBD surface surrounding the Ace2 binding sites (FIG. 1). Designs for approach 1, and approach 2, were encoded in long oligonucleotides, and screened for binding to fluorescently tagged RBD on the yeast cell surface. Deep sequencing identified 3 Ace2 helix scaffolded designs (approach 1), and 150 de novo interface designs (approach 2) that were clearly enriched following FACS sorting for RBD binding. Designs were expressed in E. coli and purified, and many were found to be have soluble expression and to bind RBD in biolayer interferometry experiments and could effectively compete with ACE-2 for binding to RBD (example shown in FIG. 2). Based on BLI data (e.g. See FIG. 2) the RBD binding affinities of minibinders are: LCB1<1 nM, LCB3<1 nM. The affinities of LCB2, LCB4, LCB5, LCB6, LCB7, LCB8 range from 1˜20 nM, with relative strength of different binders being LCB4>LCB2>LCB9=LCB5>LCB6>LCB7.

[0124] To determine whether the designs binding the RBD through the designed interfaces, site saturation libraries in which every residue in each design was substituted with each of the 20 amino acids one at a time were constructed, and subjected to FACS sorting for RBD binding. Deep sequencing showed that the binding interface residues and protein core residues were conserved in many of the designs for which such site saturation libraries (SSM's) were constructed (SSMs were used to define allowable positions for amino acid changes in Table 1). For most of the designs, a small number of substitutions were enriched in the FACS sorting, suggesting they increase binding affinity for RBD. For the highest affinity of the approach 1 designs, and 8 of the approach 2 designs, combinatorial libraries incorporating these substitutions were constructed and again screened for binding with FACS; because of the very high binding affinity the concentrations used in the sorting were as low as 20 pM. Each library converged on a small number of closely related sequences, and for each design, one of the optimized variants was expressed in E. coli and purified.

[0125] The binding of the 8 optimized designs with different binding modes to RBD (FIG. 1) was investigated by biolayer interferometry. For a number of the designs, the Kd's ranged from 1-20 nM, and for the remainder, the Kd's were below 1 nM, too strong to measure reliably with this technique (See FIG. 2). Circular dichroism spectra of the designs were consistent with the design models, and the designs retained full binding activity after a number of days at room temperature (FIG. 3).

[0126] We investigated the ability of the designs to block infection of human cells by live virus. 100 FFU of SARS-COV-2 was added to 2.5-3×104 vero cells in the presence of varying amounts of the designed binders. Details are provided in the legend to FIG. 4. We observed potent inhibition of infection for all of the designs with IC50's ranging from 1 nM to 0.02 nM.

[0127] Details on specific designs are provided in Table 10.

TABLE 10

| | | | | | Estimated | | Estimated | |
|---|---|---|---|---|---|---|---|---|
| | | | | | Level of | Estimated | Kd for | SARS-CoV-2 |
| | | | | | Soluble | Kd for | Spike | Neutralization |
| Construct | | Expression | | Expression | Production | RBD | (nM) | IC50 |
| Name | Seq ID | Host | Vector | Method | (mg/L) | (nM) | Avidity | (nM) |
| LCB1-1 | (SEQ ID | E. coli | pET | Autoinduction | 10 | 0.2 | 0.1 | 0.01 |
| | NO: 1) | | | 37 C. | | | | |
| LCB1-2 | (SEQ ID | E. coli | pET | Autoinduction | 10 | 0.2 | 0.1 | 0.01 |
| | NO: 2) | | | 37 C. | | | | |
| LCB1-3 | (SEQ ID | E. coli | pET | Autoinduction | 10 | 0.2 | 0.1 | 0.01 |
| | NO: 3) | | | 37 C. | | | | |
| LCB1-4 | (SEQ ID | E. coli | pET | Autoinduction | 10 | 0.2 | 0.1 | 0.01 |
| | NO: 4) | | | 37 C. | | | | |
| LCB1-5 | (SEQ ID | E. coli | pET | Autoinduction | 10 | 0.2 | 0.1 | 0.01 |
| | NO: 5) | | | 37 C. | | | | |
| LCB1_v1.1_Cys | (SEQ ID | E. coli | pET | Autoinduction | 10 | 0.2 | 0.1 | 0.01 |
| | NO: 6) | | | 37 C. | | | | |
| LCB1_v1.2 | (SEQ ID | E. coli | pET | Autoinduction | 10 | 0.2 | 0.1 | 0.01 |
| | NO: 7) | | | 37 C. | | | | |
| LCB1_v1.3 | (SEQ ID | E. coli | pET | Autoinduction | 10 | 0.2 | 0.1 | 0.01 |
| | NO: 8) | | | 37 C. | | | | |
| LCB1_v1.4 | (SEQ ID | E. coli | pET | Autoinduction | 10 | 0.2 | 0.1 | 0.01 |
| | NO: 9) | | | 37 C. | | | | |
| LCB1_v1.5 | (SEQ ID | E. coli | pET | Autoinduction | 10 | 0.2 | 0.1 | 0.01 |
| (LCB1_v1.3 | NO: 10) | | | 37 C. | | | | |
| with N-link | | | | | | | | |
| Glycosylation) | | | | | | | | |
| LCB2-1 | (SEQ ID | E. coli | pET | Autoinduction | 10 | 0.2 | 0.1 | 0.01 |
| | NO: 11) | | | 37 C. | | | | |
| LCB2-2 | (SEQ ID | E. coli | pET | Autoinduction | 10 | 0.2 | 0.1 | 0.01 |
| | NO: 12) | | | 37 C. | | | | |
| LCB3-1 | (SEQ ID | E. coli | pET | Autoinduction | 10 | 0.2 | 0.1 | 0.01 |
| | NO: 13) | | | 37 C. | | | | |
| LCB3-2 | (SEQ ID | E. coli | pET | Autoinduction | 10 | 0.2 | 0.1 | 0.01 |
| | NO: 14) | | | 37 C. | | | | |
| LCB3-3 | (SEQ ID | E. coli | pET | Autoinduction | 10 | 0.2 | 0.1 | 0.01 |
| | NO: 15) | | | 37 C. | | | | |
| LCB3-4 | (SEQ ID | E. coli | pET | Autoinduction | 10 | 0.2 | 0.1 | 0.01 |
| | NO: 16) | | | 37 C. | | | | |
| LCB3_v1.1 | (SEQ ID | E. coli | pET | Autoinduction | 10 | 0.2 | 0.1 | 0.01 |
| | NO: 17) | | | 37 C. | | | | |
| LCB3_v1.2 | (SEQ ID | E. coli | pET | Autoinduction | 10 | 0.2 | 0.1 | 0.01 |
| | NO: 15) | | | 37 C. | | | | |
| LCB3_v1.3 | (SEQ ID | E. coli | pET | Autoinduction | 10 | 0.2 | 0.1 | 0.01 |
| | NO: 19) | | | 37 C. | | | | |
| LCB3_v1.4 | (SEQ ID | E. coli | pET | Autoinduction | 10 | 0.2 | 0.1 | 0.01 |
| | NO: 20) | | | 37 C. | | | | |
| LCB3_v1.5 | (SEQ ID | E. coli | pET | Autoinduction | 10 | 0.2 | 0.1 | 0.01 |
| | NO: 21) | | | 37 C. | | | | |
| LCB3-4 | (SEQ ID | E. coli | pET | Autoinduc ion | 10 | 0.2 | 0.1 | 0.01 |
| | NO: 16) | | | 37 C. | | | | |
| LCB4-1 | (SEQ ID | E. coli | pET | Autoinduction | 10 | 0.2 | 0.1 | 0.01 |
| | NO: 23) | | | 37 C. | | | | |
| LCB4-2 | (SEQ ID | E. coli | pET | Autoinduction | 10 | 0.2 | 0.1 | 0.01 |
| | NO: 24) | | | 37 C. | | | | |
| LCB5-1 | (SEQ ID | E. coli | pET | Autoinduction | 10 | 0.2 | 0.1 | 0.01 |
| | NO:25) | | | 37 C. | | | | |
| LCB5-2 | (SEQ ID | E. coli | pET | Autoinduction | 10 | 0.2 | 0.1 | 0.01 |
| | NO: 26) | | | 37 C. | | | | |
| LCB6-1 | (SEQ ID | E. coli | pET | Autoinduction | 10 | 0.2 | 0.1 | 0.01 |
| | NO: 27) | | | 37 C. | | | | |
| LCB6-2 | (SEQ ID | E. coli | pET | Autoinduction | 10 | 0.2 | 0.1 | 0.01 |
| | NO: 28) | | | 37 C. | | | | |
| LCB7-1 | (SEQ ID | E. coli | pET | Autoinduction | 10 | 0.2 | 0.1 | 0.01 |
| | NO: 29) | | | 37 C. | | | | |
| LCB7-2 | (SEQ ID | E. coli | pET | Autoinduction | 10 | 0.2 | 0.1 | 0.01 |
| | NO: 30) | | | 37 C. | | | | |
| LCB8-1 | (SEQ ID | E. coli | pET | Autoinduction | 10 | 0.2 | 0.1 | 0.01 |
| | NO: 31) | | | 37 C. | | | | |
| LCB8-2 | (SEQ ID | E. coli | pET | Autoinduction | 10 | 0.2 | 0.1 | 0.01 |
| | NO: 32) | | | 37 C. | | | | |
| AHB1-1 | (SEQ ID | E. coli | pET | Autoinduction | 10 | 0.2 | 0.1 | 0.01 |
| | NO: 33) | | | 37 C. | | | | |
| AHB1-2 | (SEQ ID | E. coli | pET | Autoinduction | 10 | 0.2 | 0.1 | 0.01 |
| | NO: 34) | | | 37 C. | | | | |
| AHB2-1 | (SEQ ID | E. coli | pET | Autoinduction | 10 | 0.2 | 0.1 | 0.01 |
| | NO: 100) | | | 37 C. | | | | |
| AHB2-2 | (SEQ ID | E. coli | pET | Autoinduction | 10 | 0.2 | 0.1 | 0.01 |
| | NO: 101) | | | 37 C. | | | | |
| LCB1-6GS- | (SEQ ID | E. coli | pET | Autoinduction | 10 | 0.2 | 0.1 | 0.01 |
| LCB1 | NO: 47) | | | 37 C. | | | | |
| LCB1-12GS- | (SEQ ID | E. coli | pET | Autoinduction | 10 | 0.2 | 0.1 | 0.01 |
| LCB1 | NO: 48) | | | 37 C. | | | | |
| LCB1-24GS- | (SEQ ID | E. coli | pET | Autoinduction | 10 | 0.2 | 0.1 | 0.01 |
| LCB1 | NO: 49) | | | 37 C. | | | | |
| LCB1-36GS- | (SEQ ID | E. coli | pET | Autoinduction | 10 | 0.2 | 0.1 | 0.01 |
| LCB1 | NO: 50) | | | 37 C. | | | | |
| LCB1_v1.1- | (SEQ ID | E. coli | pET | Autoinduction | 10 | 0.2 | 0.1 | 0.01 |
| GSLCB1_v1.1 | NO: 51) | | | 37 C. | | | | |
| (1GS1) | | | | | | | | |
| LCB1_v1.1- | (SEQ ID | E. coli | pET | Autoinduction | 10 | 0.2 | 0.1 | 0.01 |
| PRO- | NO: 52) | | | 37 C. | | | | |
| LCB1_v1.1 | | | | | | | | |
| (1PRO1) | | | | | | | | |
| LCB3_v1.2- | (SEQ ID | E. coli | pET | Autoinduction | 10 | 0.2 | 0.1 | 0.01 |
| GS3- | NO: 53) | | | 37 C. | | | | |
| LCB3_v1.2 | | | | | | | | |
| (3GS3) | | | | | | | | |
| LCB3_v1.2- | (SEQ ID | E. coli | pET | Autoinduction | 10 | 0.2 | 0.1 | 0.01 |
| PRO- | NO: 54) | | | 37 C. | | | | |
| LCB3_v1.2 | | | | | | | | |
| (3PRO3) | | | | | | | | |
| LCB1_v1.1- | (SEQ ID | E. coli | pET | Autoinduction | 10 | 0.2 | 0.1 | 0.01 |
| GS- | NO: 55) | | | 37 C. | | | | |
| LCB3_v1.2 | | | | | | | | |
| (1GS3) | | | | | | | | |
| LCB3_v1.2- | (SEQ ID | E. coli | pET | Autoinduction | 10 | 0.2 | 0.1 | 0.01 |
| GS- | NO: 56) | | | 37 C. | | | | |
| LCB1_v1.1 | | | | | | | | |
| (3GS1) | | | | | | | | |
| LCB3_v1.2- | (SEQ ID | E. coli | pET | Autoinduction | 10 | 0.2 | 0.1 | 0.01 |
| 10GS- | NO: 57) | | | 37 C. | | | | |
| LCB1_v1.1 | | | | | | | | |
| (LCB3-GS10- | | | | | | | | |
| LCB1) | | | | | | | | |
| LCB1_v1.1- | (SEQ ID | E. coli | pET | Autoinduction | 10 | 0.2 | 0.1 | 0.01 |
| PRO- | NO: 58) | | | 37 C. | | | | |
| LCB3_v1.2 | | | | | | | | |
| (1PRO3) | | | | | | | | |
| LCB3_v1.2- | (SEQ ID | E. coli | pET | Autoinduction | 10 | 0.2 | 0.1 | 0.01 |
| PRO- | NO: 59) | | | 37 C. | | | | |
| LCB1_v1.1 | | | | | | | | |
| (3PRO1) | | | | | | | | |
| (5_LCB1_linker14) | (SEQ ID | E. coli | pET | Autoinduction | 20.38 | 0.2 | 0.1 | 0.01141 |
| | NO: 60) | | | 37 C. | | | | |
| Mucin_LCB1_ | (SEQ ID | E. coli | pET | Autoinduction | 10 | 0.2 | 0.1 | 0.01 |
| v1.1_Cys | NO: 65) | | | 37 C. | | | | |
| Mucin_LCB1_ | (SEQ ID | E. coli | pET | Autoinduction | 10 | 0.2 | 0.1 | 0.01 |
| v1.3 | NO: 66) | | | 37 C. | | | | |
| LCB1_v1.3_Mucin | (SEQ ID | E. coli | pET | Autoinduction | 10 | 0.2 | 0.1 | 0.01 |
| | NO: 67) | | | 37 C. | | | | |
| LCB1-Fc1 | (SEQ ID | Human | pCMVR | Transient | 12 | 0.2 | 0.1 | 0.01 |
| (BM40-LCB1- | NO: 68) | 293 | | Transfection | | | | |
| GS4-Fc-Opt- | | cells | | 37 C. | | | | |
| WT) (The | | | | | | | | |
| LCB1 | | | | | | | | |
| sequences = | | | | | | | | |
| LCB1-1 of | | | | | | | | |
| first | | | | | | | | |
| provisional) | | | | | | | | |
| LCB1-Fc2 | (SEQ ID | Human | pCMVR | Transfection | 12 | 0.2 | 0.1 | 0.01 |
| (BM40-LCB1- | NO: 69) | 293 | | Transient | | | | |
| GS15-Fc-Opt- | | cells | | 37 C. | | | | |
| WT) (The LCB1 | | | | | | | | |
| sequence = | | | | | | | | |
| LCB1-1 of | | | | | | | | |
| first | | | | | | | | |
| provisional) | | | | | | | | |
| LCB1-Fc3 | (SEQ ID | Human | pCMVR | Transient | 12 | 0.2 | 0.1 | 0.01 |
| (BM40-Fc- | NO: 70) | 293 | | Transfection | | | | |
| Opt-GS15-2- | | cells | | 37 C. | | | | |
| LCB1-WT) | | | | | | | | |
| (The LCB1 | | | | | | | | |
| sequence = | | | | | | | | |
| LCB1-1 of | | | | | | | | |
| first | | | | | | | | |
| provisional) | | | | | | | | |
| LCB1-Fc4 | (SEQ ID | Human | pCMVR | Transient | 2 | 0.2 | 0.1 | 0.01 |
| (BM40-LCB1- | NO: 71) | 293 | | Transfection | | | | |
| GS15-Fc-Opt- | | cells | | 37 C. | | | | |
| GS15-2-LCB1- | | | | | | | | |
| WT) (The | | | | | | | | |
| LCB1 | | | | | | | | |
| sequences = | | | | | | | | |
| LCB1-1 of | | | | | | | | |
| first | | | | | | | | |
| provisional) | | | | | | | | |
| LCB1-Fc5 | (SEQ ID | Human | pCMVR | Transient | 6 | 0.2 | 0.1 | 0.01 |
| (BM40-LCB1- | NO: 72) | 293 | | Transfection | | | | |
| GS4-Fc-Opt- | | cells | | 37 C. | | | | |
| Q38) (The | | | | | | | | |
| LCB1 | | | | | | | | |
| sequence = | | | | | | | | |
| LCB1-3 of | | | | | | | | |
| first | | | | | | | | |
| provisional) | | | | | | | | |
| LCB1-Fc6 | (SEQ ID | Human | pCMVR | Transient | 5 | 0.2 | 0.1 | 0.01 |
| (BM40-LCB1- | NO: 73) | 293 | | Transfection | | | | |
| GS15-Fc-Opt- | | cells | | 37 C. | | | | |
| Q38) (The | | | | | | | | |
| LCB1 | | | | | | | | |
| sequence = | | | | | | | | |
| LCB1-3 of | | | | | | | | |
| first | | | | | | | | |
| provisional) | | | | | | | | |
| LCB1-Fc7 | (SEQ ID | Human | pCMVR | Transient | 10 | 0.2 | 0.1 | 0.01 |
| (BM40-Fc- | NO: 74) | 293 | | Transfection | | | | |
| Opt-GS15-2- | | cells | | 37 C. | | | | |
| LCB1-Q38) | | | | | | | | |
| (The LCB1 | | | | | | | | |
| sequence = | | | | | | | | |
| LCB1-3 of | | | | | | | | |
| first | | | | | | | | |
| provisional) | | | | | | | | |
| LCB1-Fc8 | (SEQ ID | Human | pCMVR | Transient | 1 | 0.2 | 0.1 | 0.01 |
| (BM40-LCB1- | NO: 75) | cells | | Transfection | | | | |
| Q38-GS15-Fc- | | 293 | | 37 C. | | | | |
| Opt-GS15-2- | | | | | | | | |
| LCB1- | | | | | | | | |
| 238) (The | | | | | | | | |
| LCB1 | | | | | | | | |
| sequences = | | | | | | | | |
| LCB1-3 of | | | | | | | | |
| first | | | | | | | | |
| provisional) | | | | | | | | |
| LCB1-6M-Fc9 | (SEQ ID | Human | pCMVR | Transient | 20 | 0.2 | 0.1 | 0.01 |
| (BM40-LCB1- | NO: 76) | 293 | | Transfection | | | | |
| 6M- | | cells | | 37 C. | | | | |
| 4N, 14K, 15T, | | | | | | | | |
| 18Q, 27Q, 38Q- | | | | | | | | |
| GS15-Fc-Opt) | | | | | | | | |
| LCB1-6M- | (SEQ ID | Human | pCMVR | Transient | 20 | 0.2 | 0.1 | 0.01 |
| Ng1y-Fc10 | NO: 77) | 293 | | Transfection | | | | |
| (BM40-LCB1- | | cells | | 37 C. | | | | |
| 6M-Ng1y- | | | | | | | | |
| 4N, 14K, 15T, | | | | | | | | |
| 18Q, 27N, 38Q- | | | | | | | | |
| GS15-Fc-Opt) | | | | | | | | |
| (The LCB1 | | | | | | | | |
| sequence = | | | | | | | | |
| LCB1-5 of | | | | | | | | |
| the original | | | | | | | | |
| provisional = | | | | | | | | |
| LCB1_v1.1 = | | | | | | | | |
| LCB1-4 | | | | | | | | |
| with N-link | | | | | | | | |
| Glycosylation) | | | | | | | | |
| LCB3-6M-Fc11 | (SEQ ID | Human | pCMVR | Transient | 5 | 0.2 | 0.1 | 0.01 |
| (BM40-LCB3- | NO: 78) | 293 | | Transfection | | | | |
| 6M | | cells | | 37 C. | | | | |
| 8Q, 26Q, 28H, | | | | | | | | |
| 35K, 37T, 43K- | | | | | | | | |
| GS15-Fc-Opt) | | | | | | | | |
| (LCB | | | | | | | | |
| sequence is | | | | | | | | |
| the same as | | | | | | | | |
| LCB3-3 of | | | | | | | | |
| First | | | | | | | | |
| Provisional) | | | | | | | | |
| LCB3-6M- | (SEQ ID | Human | pCMVR | Transient | 5 | 0.2 | 0.1 | 0.01 |
| NG1y-Fc12 | NO: 79) | 293 | | Transfection | | | | |
| (BM40-LCB3- | | cells | | 37 C. | | | | |
| 6M-Ng1y- | | | | | | | | |
| 8Q, 26Q, 28H, | | | | | | | | |
| 35N, 37T, 43K- | | | | | | | | |
| GS15-Fc-Opt) | | | | | | | | |
| (LCB | | | | | | | | |
| sequence is | | | | | | | | |
| the same as | | | | | | | | |
| LCB3-4 of | | | | | | | | |
| First | | | | | | | | |
| Provisional | | | | | | | | |
| which is | | | | | | | | |
| LCB3-3 with | | | | | | | | |
| N-link | | | | | | | | |
| Glycosylation) | | | | | | | | |
| LCB1-6M- | (SEQ ID | Human | pCMVR | Transient | 2 | 0.2 | 0.1 | 0.01 |
| GPGcP-Fc13 | NO: 80) | cells | | Transfection | | | | |
| (BM40-LCB1- | | 293 | | 37 C. | | | | |
| 6M- | | | | | | | | |
| 4N, 14K, 15T, | | | | | | | | |
| 18Q, 27Q, 38Q- | | | | | | | | |
| GPGcP-Fc- | | | | | | | | |
| Opt) (LCB | | | | | | | | |
| sequence is | | | | | | | | |
| the same as | | | | | | | | |
| LCB3-3 of | | | | | | | | |
| First | | | | | | | | |
| Provisional) | | | | | | | | |
| LCB3-6M- | (SEQ ID | Human | pCMVR | Transient | 2 | 0.2 | 0.1 | 0.01 |
| GPGcP-Fc14 | NO: 81) | 293 | | Transfection | | | | |
| BM40-LCB3- | | cells | | 37 C. | | | | |
| 6M- | | | | | | | | |
| 8Q, 26Q, 28H, | | | | | | | | |
| 35K, 37T, 43K- | | | | | | | | |
| GPGcP-Fc- | | | | | | | | |
| Opt) (LCB | | | | | | | | |
| sequence is | | | | | | | | |
| the same as | | | | | | | | |
| LCB3-3 of | | | | | | | | |
| First | | | | | | | | |
| Provisional) | | | | | | | | |
| LCB1-6M- | (SEQ ID | Human | pCMVR | Transient | 1 | 0.2 | 0.1 | 0.01 |
| (BM40-LCB1- | NO: 82) | 293 | | Transfection | | | | |
| 6M- | | cells | | 37 C. | | | | |
| 4N, 14K, 15T, | | | | | | | | |
| 18Q, 27Q, 38Q- | | | | | | | | |
| GS30-Fc- | | | | | | | | |
| Opt) LCB1-4 | | | | | | | | |
| GS30-Fc15 | | | | | | | | |
| LCB3-6M- | (SEQ ID | Human | pCMVR | 37 C. | 1 | 0.2 | 0.1 | 0.01 |
| GS30-Fc16 | NO: 83) | 293 | | Transient | | | | |
| (BM40-LCB3- | | cells | | Transfection | | | | |
| 6M- | | | | | | | | |
| 8Q, 26Q, 28H, | | | | | | | | |
| 35K, 37T, 43K | | | | | | | | |
| GS30-Fc-Opt) | | | | | | | | |
| (LCB | | | | | | | | |
| sequence is | | | | | | | | |
| the same as | | | | | | | | |
| LCB3-3 of | | | | | | | | |
| First | | | | | | | | |
| Provisional) | | | | | | | | |
| LCB1-v1.3- | (SEQ ID | Human | pCMVR | Transient | 5 | 0.2 | 0.1 | 0.01 |
| Fc17 (BM40- | NO: 84) | 293 | | Transfection | | | | |
| LCB1-v1.3- | | cells | | 37 C. | | | | |
| 4N, 14K, 15T, | | | | | | | | |
| 17E, 18Q, 27Q, | | | | | | | | |
| 38Q-GS15-Fc- | | | | | | | | |
| Opt) | | | | | | | | |
| LCB1-v1.3- | (SEQ ID | Human | pCMVR | Transient | 5 | 0.2 | 0.1 | 0.01 |
| Ng1y-Fc18 | NO: 85) | 293 | | Transfection | | | | |
| (BM40-LCB1- | | cells | | 37 C. | | | | |
| v1.3 Ng1y- | | | | | | | | |
| 4N, 14K, 15T, | | | | | | | | |
| 17E, 18Q, 27N, | | | | | | | | |
| 38Q-GS15-Fc- | | | | | | | | |
| Opt) | | | | | | | | |
| (>LCB1_v1.5 | | | | | | | | |
| (=LCB1_v1.3 | | | | | | | | |
| with N-link | | | | | | | | |
| Glycosylation) | | | | | | | | |
| LCB1-v1.3- | (SEQ ID | Human | pCMVR | Transient | 5 | 0.2 | 0.1 | 0.01 |
| GPGcP-Fc19 | NO: 86) | 293 | | Transfection | | | | |
| (BM40-LCB1- | | cells | | 37 C. | | | | |
| v1.3-Fc19 | | | | | | | | |
| 4N, 14K, 15T, | | | | | | | | |
| 17E, 18Q, 27Q, | | | | | | | | |
| 38Q-GPGcP-Fc- | | | | | | | | |
| Opt) | | | | | | | | |
| LCB1-v1.3- | (SEQ ID | Human | pCMVR | Transient | 5 | 0.2 | 0.1 | 0.01 |
| GS30-Fc20 | NO: 87) | 293 | | Transfection | | | | |
| (BM40-LCB1- | | cells | | 37 C. | | | | |
| v1.3- | | | | | | | | |
| 4N, 14K, 15T, | | | | | | | | |
| 17E, 18Q, 27Q, | | | | | | | | |
| 38Q-GS30-Fc- | | | | | | | | |
| Opt) | | | | | | | | |

[0128] The designed binders have several advantages over antibodies as potential therapeutics. Together, they span a range of binding modes, and in combination viral escape would be quite unlikely. The retention of activity after extended time at elevated temperatures suggests they would not require a cold chain. The designs are 20 fold smaller than a full antibody molecule, and hence in an equal mass have 20 fold more potential neutralizing sites, increasing the potential efficacy of a locally administered drug. The cost of goods and the ability to scale to very high production should be lower for the much simpler miniproteins, which unlike antibodies, do not require expression in mammalian cells for proper folding. The small size and high stability should make them amenable to direct delivery into the respiratory system by nebulization. Immunogenicity is a potential problem with any foreign molecule, but for previously characterized small de novo designed proteins little or no immune response has been observed, perhaps because the high solubility and stability together with the small size makes presentation on dendritic cells less likely.

### REFERENCES

[0129] 1. Yuan M, Wu NC, Zhu X, Lee C D, So RTY, Lv H, Mok CKP, Wilson IA: A highly conserved cryptic epitope in the receptor binding domains of SARS-CoV-2 and SARS-COV. Science 2020, 368(6491):630-633.
[0130] 2. Case J B, Rothlauf P W, Chen R E, Liu Z, Zhao H, Kim AS, Bloyet L-M, Zeng Q, Tahan S, Droit L et al: Neutralizing antibody and soluble ACE2 inhibition of a replication-competent VSV-SARS-COV-2 and a clinical isolate of SARS-COV-2. bioRxiv 2020:2020.2005.2018.102038.

[0131] Ultrapotent Miniproteins Targeting the Receptor-Binding Domain Protect Against SARS-CoV-2 Infection and Disease

[0132] Despite the introduction of public health measures and spike protein-based vaccines to mitigate the COVID-19 pandemic, SARS-COV-2 infections and deaths continue to rise. Here, we investigated the capacity of modified versions of one lead binder, LCB1, to protect against SARS-COV-2-mediated lung disease in human ACE2-expressing transgenic mice. Systemic administration of LCB1-Fc reduced viral burden, diminished immune cell infiltration and inflammation, and completely prevented lung disease and pathology. A single intranasal dose of LCB1v1.3 reduced SARS-COV-2 infection in the lung even when given as many as five days before or two days after virus inoculation. Importantly, LCB1v1.3 protected in vivo against a historical strain (WA1/2020), an emerging B.1.1.7 strain, and a strain encoding key E484K and N501Y spike protein substitutions. These data support the use of LCB1v1.3 for prevention or treatment of SARS-COV-2 infection.

[0133] Severe Acute Respiratory Syndrome Coronavirus 2 (SARS-COV-2), the cause of the Coronavirus Disease 2019 (COVID-19) pandemic, has resulted in global disease, suffering, and economic hardship. Despite implementation of public health measures, SARS-COV-2 transmission persists principally through human-to-human spread (Day, 2020; Li et al., 2020; Stand1 et al., 2020). SARS-COV-2-induced clinical manifestations range from asymptomatic infection to severe pneumonia, multi-organ failure, and death. Although the underlying mechanisms that dictate disease severity are poorly understood, the immunocompromised, the elderly, and those with specific comorbidities (e.g., history of cardiovascular disease, diabetes, or obesity) are at increased risk for poor outcome (Zhou et al., 2020).

[0134] Here, using a stringent model of SARS-COV-2 disease pathogenesis in human ACE2 (hACE2)-expressing transgenic mice (Golden et al., 2020; Winkler et al., 2020a), we evaluated the efficacy in vivo of exemplary miniprotein binder, LCB1. For our in vivo experiments, we evaluated two versions of LCB1: (a) an Fc-modified bivalent form, LCB1-hIgG-Fc9 (LCB1-Fc) that should extend half-life in vivo and engage effector arms of the immune system; and (b) a further optimized, monomeric form of LCB1 lacking an Fc domain, LCB1v1.3. Intraperitoneal administration of LCB1-Fc at one day pre- or post SARS-CoV-2 exposure conferred substantial protection including an absence of weight loss, reductions in viral burden approaching the limit of detection, and inhibition of lung inflammation and pathology. Intranasal delivery of LCB1v1.3 conferred protection as many as five days before or two days after SARS-COV-2 inoculation. Dosing experiments revealed that LCB1v1.3 retained efficacy at pharmacologically attainable concentrations and was weakly immunogenic. Most importantly, LCB1v1.3 protected animals against the currently emerging B.1.1.7 United Kingdom variant and a SARS-COV-2 strain encoding key spike substitutions E484K and N501Y present in both the South Africa (B.1.351) and Brazil (B.1.1.248) variants of concern. Overall, these studies establish LCB1-Fc and LCB1v1.3 as possible treatments to prevent or mitigate SARS-COV-2 disease.

[0135] Results

[0136] LCB1v1.3 prophylaxis limits viral burden and clinical disease. We modified LCB1 to generate two versions for in vivo testing: (a) we introduced polar mutations into LCB1 to increase expression yield and solubility without altering RBD binding (LCB1v1.3) and (b) we modified LCB1 by fusing it to a human IgG1 Fc domain (LCB1-Fc) to enhance bioavailability. LCB1v1.3 and LCB1-Fc bound avidly to a single RBD within the S trimer (FIG. 5A) with dissociation constants (KD) of less than 625 and 156 pM, respectively (FIG. 5B). LCB1v1.3 and LCB1-Fc also potently neutralized an authentic SARS-COV-2 isolate (2019n-CoV/USA_WA1/2020 [WA1/2020]) (EC₅₀ of 14.4 and 71.8 pM, respectively; FIG. 5C).

[0137] To determine the protective potential of these miniproteins against SARS-COV-2, we utilized K18 human hACE2-expressing transgenic mice, which develop severe lung infection and disease after intranasal inoculation of SARS-COV-2 (Golden et al., 2020; Winkler et al., 2020a). In prophylaxis studies, a single 250 μg (10 mg/kg) dose of LCB1-Fc administered by intraperitoneal injection (i.p.) one day prior to intranasal (i.n.) inoculation with 10³ PFU of SARS-COV-2 WA1/2020 prevented weight loss compared to animals given a control protein (influenza A virus hemagglutinin minibinder) designed using similar computational methods (FIG. 5D). After LCB1-Fc prophylaxis, infectious virus was not detected in the lungs at 4- or 7-days post-infection (dpi), whereas high levels were observed in animals administered control protein (FIG. 5E, top and bottom). Similarly, viral RNA levels in the lung, heart, spleen, and brain of LCB1-Fc treated animals were at or near the limit of detection of the assay at 4 or 7 dpi (FIG. 5F-I). LCB1-Fc treatment had no effect on viral RNA levels in nasal wash samples obtained at 4 dpi (FIG. 5J), results that are similar to a recent study of a neutralizing human antibody in hamsters (Zhou et al., 2021). However, viral RNA levels were reduced at 7 dpi, suggesting that LCB1-Fc treatment accelerated viral clearance or prevented spread in the upper respiratory tract.

[0138] Diffuse alveolar damage, inflammation, and pneumonia are manifestations of COVID-19 lung disease, culminating in respiratory failure and a requirement for mechanical ventilation (Johnson et al., 2020; Kordzadeh-Kermani et al., 2020). We evaluated the capacity of LCB1-Fc to prevent the compromised lung function seen after SARS-COV-2 infection of K18-hACE2 mice (Winkler et al., 2020a). At 7 dpi, mechanical ventilation tests of lung biomechanics in animals treated with LCB1-Fc showed no difference from naïve animals (FIG. 6A), whereas mice receiving the control binder protein showed decreased inspiratory capacity and lung compliance as well as increased pulmonary resistance, elastance, and tissue damping, all consistent with compromised lung function. These biophysical properties resulted in disparate pressure-volume loops between control binder and LCB1-Fc treated or naïve animals. We also assessed the effect of LCB1-Fc treatment on SARS-COV-2-induced lung pathology. Lung sections of animals collected at 7 dpi with SARS-COV-2 showed widespread inflammation characterized by a cellular infiltrate and airspace consolidation in control protein-treated but not LCB1-Fc treated or naïve mice (FIG. 6B). At 4 dpi, inflammatory cytokine and chemokine RNA signatures in the lung were absent in LCB1-Fc treated but not control binder treated animals, suggesting that LCB1-Fc treatment prevents virus infection and inflammation in the lung (FIGS. 6C and 11).

[0139] Post-exposure therapy with anti-RBD binders reduces viral burden. To evaluate its efficacy in a post-exposure setting, we administered LCB1-Fc by i.p. injection at 1 dpi. Therapy with LCB1-Fc prevented weight loss (FIG. 7A) and reduced viral burden in all tested tissues at 4 and 7 dpi (FIG. 7B-G). Infectious virus was not recovered from the lungs of LCB1-Fc treated animals collected at either timepoint. Lung sections confirmed that therapy with LCB1-Fc improved pathological outcome (FIG. 7H). At 7 dpi, immune cell infiltrates were absent in the lung sections of LCB1-Fc treated but not control binder-treated animals.

[0140] We next tested the efficacy of LCB1v1.3 as an i.n.-delivered post-exposure therapy. I.n. delivery, might enable self-administration of an anti-SARS-CoV-2 biological drug. Indeed, miniprotein inhibitors against influenza virus have shown efficacy as a nasal mist (Chevalier et al., 2017). For these studies, we used LCB1v1.3 because it can bind an increased number of RBD molecules for a given mass dose, resulting in increased neutralization activity (FIG. 5C). Whereas high levels of SARS-COV-2 RNA were detected in the lungs and other peripheral tissues of control binder-treated animals at 7 dpi, infection was reduced in animals receiving LCB 1v1.3 by i.n. administration at D+1 or D+2 after inoculation with SARS-COV-2 (FIGS. 7I and 12). Levels of viral RNA were reduced in the nasal washes of animals receiving LCB1v1.3 after treatment at D+1 but not D+2 compared to control binder-treated animals (FIG. 7J).

[0141] Intranasal delivery of LCB1v1.3 confers protection against SARS-CoV-2 when administered up to 5 days before infection. We next evaluated the durability of LCB1v1.3 administered via i.n. prophylaxis. At 5 days, 3 days, 1 day, or 6 hours prior to inoculation with 10³ PFU of SARS-COV-2, K18-hACE2 transgenic mice received a single 50 μg i.n. dose of LCB1v1.3 or the control binder. At 4 or 7 dpi, viral burden in tissues was determined by RT-qPCR. As expected, protection by LCB1v1.3 was better when administered closer to the time of SARS-COV-2 exposure, as reflected by greater reductions in viral load and weight loss (FIG. 8A-D and S3). However, even mice receiving LCB1v1.3 five days prior to inoculation and collected at 7 dpi showed reduced viral RNA levels in the lung compared to control binder treated animals. Regardless of the collection timepoint, lung viral RNA levels were reduced in animals receiving LCB1v1.3 three days prior to inoculation with SARS-CoV-2.

[0142] We tested a range of i.n. doses LCB1v1.3 for efficacy (FIG. 8E-J). Treatment with as little as 2 μg (0.1 mg/kg) of LCB1v1.3 prevented SARS-COV-2-induced weight loss. Doses between 2 and 10 μg (0.1 to 0.5 mg/kg) of LCB1v1.3 reduced viral RNA levels in the lung, heart, and spleen at 7 dpi relative to control binder-treated animals. Moreover, animals receiving a 50 μg dose of LCB1v1.3 showed minimal, if any, lung inflammation (FIG. 8K). Collectively, these results indicate that even low doses of LCB1v1.3, when administered via an i.n. route prior to exposure, can limit SARS-COV-2 infection and disease in the stringent K18-hACE transgenic mouse model of pathogenesis.

[0143] LCB1v1.3 is weakly immunogenic and retains protective activity after repeated dosing. We treated K18-hACE2 transgenic mice with 50 μg of control binder or LCB1v1.3 every three days for a total of 18 days (FIG. 9A). At this time, we collected sera and assessed the presence of anti-LCB1v1.3 antibodies. Only 1 of 10 mice developed IgG antibodies against LCB1v1.3 (FIG. 9B). To determine if repeated dosing affected LCB1v1.3-mediated protection, we challenged the cohort with 10³ PFU of SARS-COV-2. Again, substantial protection against weight loss (FIG. 9C) and viral infection in the lung and other organs was observed in all animals receiving LCB1v1.3 (FIG. 9D-H).

[0144] LCB1v1.3 protects against emerging SARS-COV-2 variants. We evaluated the activity of LCB1v1.3 against a B.1.1.7 isolate containing deletions at 69-70 and 144-145, and substitutions at N501Y, A570D, D614G, and P681H, and against a recombinant WA1/2020 strain containing key substitutions present in the B.1.351 and B.1.248 variant strains at residues E484K, N501Y, and D614G (Xie et al., 2021a). Although the neutralizing activity of LCB1v1.3 against the B.1.1.7 and E484K/N501Y/D614G strains was approximately 45 to 50-fold lower than for the WA1/2020 strain, the EC₅₀ values still were ˜800 pM and 667 pM, respectively (FIG. 10A). To determine whether LCB1v1.3 could protect in vivo against SARS-CoV-2 strains with concerning spike protein substitutions, we treated K18-hACE2 transgenic mice with a single i.n. 50 μg dose of LCB1v1.3 or control binder one day prior to inoculation with 10³ PFU of B.1.1.7 or E484K/N501/D614G SARS-COV-2. Notably, LCB1v1.3 treatment before challenge with either variant strain protected against weight loss (FIGS. 10B and 10H) and viral infection in all tissues collected at 6 dpi (FIGS. 10C-G and 101-M). Thus, LCB1v1.3 is effective against both circulating and emerging strains of SARS-COV-2.

### DISCUSSION

[0145] Here, using the stringent K18-hACE2 mouse model of SARS-COV-2 pathogenesis, we show that LCB1-Fc prevented SARS-COV-2 infection and disease when administered one day before or after virus inoculation. Lung biomechanics of mice treated with LCB1-Fc mirrored those of naïve animals in all parameters tested.

[0146] We also evaluated the efficacy of LCB1v1.3, an optimized, monomeric form of LCB1 without an Fc domain. A single i.n. dose of LCB1v1.3 reduced viral burden when administered as many as five days before or two days after SARS-COV-2 infection. Our i.n. delivery approach is unique. I.n. therapy of SARS-COV-2 has been reported only with type I interferon in a hamster model of disease (Hoagland et al., 2021) and efficacy was limited. The K18-hACE2 mouse model recapitulates several aspects of severe COVID-19, including lung inflammation and reduced pulmonary function (Golden et al., 2020; Winkler et al., 2020a). Since K18-hACE2 mice are highly vulnerable to infection, the therapeutic window of treatment is limited (Winkler et al., 2020b) and for our miniproteins, might only curb viral infection. Importantly, our data demonstrate that LCB1v1.3 binder treatment before or after infection limited immune cell infiltration and lung inflammation, which prevented tissue damage and compromise of respiratory function. As part of our proof-of-principle studies for a nasal prophylaxis, we observed little immunogenicity of LCB1v1.3, suggesting that repeated dosing may be possible.

[0147] Although several antibody-based therapies demonstrate promise against SARS-COV-2, and a few have been granted EUA status, viral evolution could jeopardize these interventions as evidenced by the emerging variants in the United Kingdom (B.1.1.7), South Africa (B.1.351), Brazil (B.1.248), and elsewhere. Indeed, we and others have observed that many monoclonal and polyclonal antibodies showed reduced neutralization activity against several of these variant strains (Chen et al., 2021; Wang et al., 2021a; Wang et al., 2021b; Wibmer et al., 2021; Xie et al., 2021b). In comparison, LCB1v1.3 showed efficacy against historical (WA1/2020) and emerging (B.1.1.7 and E484K/N501Y/D614G) SARS-COV-2 strains. Based on the cryo-EM structure of the parent LCB1 binder in complex with SARS-CoV-2 RBD (Cao et al., 2020), only the N501Y mutation is expected to affect binding. While we observed a decrease in the neutralizing activity of LCB1v1.3 against the emerging variants, EC 50 values were still less than 800 pM, suggesting substantial potency was retained.

[0148] Compared to other potential SARS-COV-2 antibody-based treatments, miniproteins have several benefits: (a) due to their smaller size, they can bind each protomer of a single trimeric spike, resulting in greater potency for a given dose; (b) they can be manufactured cost-effectively; and (c) they can be mixed using linker proteins to generate multimerized constructs that limit resistance.

[0149] Experimental Model and Subject Details

[0150] Cells and viruses. Vero E6 (CRL-1586, American Type Culture Collection (ATCC), Vero CCL81 (ATCC), Vero-furin (Mukherjee et al., 2016), and Vero-hACE2-TMPRSS2 (a gift of A. Creanga and B. Graham, NIH) were cultured at 37° C. in Dulbecco's Modified Eagle medium (DMEM) supplemented with 10% fetal bovine serum (FBS), 10 mM HEPES pH 7.3, 1 mM sodium pyruvate, 1× non-essential amino acids, and 100 U/ml of penicillin-streptomycin. Additionally, Vero-hACE2-TMPRSS2 cells were cultured in the presence of 5 μg/mL puromycin. The WA1/202 (2019n-CoV/USA_WA1/2020) isolate of SARS-COV-2 was obtained from the US Centers for Disease Control (CDC). The B.1.1.7 and WA1/2020 E484K/N501Y/D614G viruses have been described previously (Chen et al., 2021; Xie et al., 2021a). Infectious stocks were propagated by inoculating Vero CCL81 or Vero-hACE2-TMPRSS2 cells. Supernatant was collected, aliquoted, and stored at −80° C. All work with infectious SARS-COV-2 was performed in Institutional Biosafety Committee-approved BSL3 and A-BSL3 facilities at Washington University School of Medicine using positive pressure air respirators and protective equipment.

[0151] Mouse experiments. Animal studies were carried out in accordance with the recommendations in the Guide for the Care and Use of Laboratory Animals of the National Institutes of Health. The protocols were approved by the Institutional Animal Care and Use Committee at the Washington University School of Medicine (assurance number A3381-01).

[0152] Virus inoculations were performed under anesthesia that was induced and maintained with ketamine hydrochloride and xylazine, and all efforts were made to minimize animal suffering.

[0153] Heterozygous K18-hACE c57BL/6J mice (strain: 2B6·Cg-Tg(K18-ACE2)₂Prlmn/J) were obtained from The Jackson Laboratory. Animals were housed in groups and fed standard chow diets. Mice of different ages and both sexes were administered 10³ PFU of SARS-COV-2 via intranasal administration.

### Method Details

[0154] Miniprotein production. LCB1-Fc was synthesized and cloned by GenScript into pCMVR plasmid, with kanamycin resistance. Plasmids were transformed into the NEB 5-alpha strain of E. coli (New England Biolabs) to recover DNA for transient transfection into Expi293F mammalian cells. Expi293F cells were grown in suspension using Expi293F expression medium (Life Technologies) at 33° C., 70% humidity, and 8% CO2 rotating at 150 rpm. The cultures were transfected using PEI-MAX (Polyscience) with cells grown to a density of 3×106 cells per mL and cultivated for 3 days. Supernatants were clarified by centrifugation (5 min at 4000×g, addition of PDADMAC solution to a final concentration of 0.0375% (Sigma Aldrich, #409014), and a second spin (5 min at 4000×g). Clarified supernatants were purified using a MabSelect PrismA™ 2.6×5 cm column (Cytiva) on an AKTA Avant150 FPLC (Cytiva). Bound protein was washed with five column volumes of 20 mM NaPO₄ and 150 mM NaCl pH 7.2, then five column volumes of 20 mM NaPO₄ and 1 M NaCl pH 7.4, and eluted with three column volumes of 100 mM glycine at pH 3.0. The eluate was neutralized with 2 M Tris base to a final concentration of 50 mM. SDS-PAGE was used to assess protein purity. The protein was passed through a 0.22 μm filter and stored at 4° C. until use.

[0155] LCB1v1.3 with polar mutations (4N, 14K, 15T, 17E, 18Q, 27Q, 38Q) relative to the original LCB1 was cloned into a pet29b vector. LCB1v1.3 was expressed in Lemo21(DE3) (NEB) in terrific broth media and grown in 2 L baffled shake flasks. Bacteria were propagated at 37° C. to an O.D.600 of ˜0.8, and then induced with 1 mM IPTG. Expression temperature was reduced to 18° C., and the cells were shaken for ˜16 h. The cells were harvested and lysed using heat treatment and incubated at 80° C. for 10 min with stirring. Lysates were clarified by centrifugation at 24,000×g for 30 min and applied to a 2.6×10 cm Ni Sepharose™ 6 FF column (Cytiva) for purification by IMAC on an AKTA Avant150 FPLC system (Cytiva). Proteins were eluted over a linear gradient of 30 mM to 500 mM imidazole in a buffer of 50 mM Tris pH 8.0 and 500 mM NaCl. Peak fractions were pooled, concentrated in 10 kDa MWCO centrifugal filters (Millipore), sterile filtered (0.22 μm) and applied to either a Superdex™ 200 Increase 10/300, or HiLoad S200 pg GL SEC column (Cytiva) using 50 mM phosphate pH 7.4, 150 mM NaCl buffer. After size exclusion chromatography, bacterial-derived components were tested to confirm low levels of endotoxin.

[0156] Biolayer interferometry. Biolayer interferometry data were collected using an Octet™ RED96 (ForteBio) and processed using the instrument's integrated software. Briefly, biotinylated RBD (Acro Biosystems) was loaded onto streptavidin-coated biosensors (SA ForteBio) at 20 nM in binding buffer (10 mM HEPES (pH 7.4), 150 mM NaCl, 3 mM EDTA, 0.05% surfactant P20, and 0.5% non-fat dry milk) for 360 s. Analyte proteins (LCB1v1.3 or LCB1-Fc) were diluted from concentrated stocks into binding buffer. After baseline measurement in the binding buffer alone, the binding kinetics were monitored by dipping the biosensors in wells containing the target protein at the indicated concentration (association step) for 3,600 s and then dipping the sensors back into baseline/buffer (dissociation) for 7,200 s.

[0157] Plaque assay. Vero-furin cells (Mukherjee et al., 2016) were seeded at a density of 2.5×105 cells per well in flat-bottom 12-well tissue culture plates. The following day, medium was removed and replaced with 200 μL of 10-fold serial dilutions of the material to be titrated, diluted in DMEM+2% FBS, and plates incubated at 37° C. with rocking at regular intervals. One hour later, 1 mL of methylcellulose overlay was added. Plates were incubated at 37° C. for 72 h, then fixed with 4% paraformaldehyde (final concentration) in PBS for 20 min. Fixed cell monolayers were stained with 0.05% (w/v) crystal violet in 20% methanol and washed twice with distilled, deionized water.

[0158] Measurement of viral burden. Tissues were weighed and homogenized with zirconia beads in a MagNA Lyser™ instrument (Roche Life Science) in 1,000 μL of DMEM media supplemented with 2% heat-inactivated FBS. Tissue homogenates were clarified by centrifugation at 10,000 rpm for 5 min and stored at −80° C. RNA was extracted using the MagMax mirVana™ Total RNA isolation kit (Thermo Scientific) on a Kingfisher Flex extraction robot (Thermo Scientific). RNA was reverse transcribed and amplified using the TaqMan™ RNA-to-CT 1-Step Kit (ThermoFisher). Reverse transcription was carried out at 48° C. for 15 min followed by 2 min at 95° C. Amplification was accomplished over 50 cycles as follows: 95° C. for 15 s and 60° C. for 1 min. Copies of SARS-COV-2 N gene RNA in samples were determined using a previously published assay (Case et al., 2020; Hassan et al., 2020). Briefly, a TaqMan™ assay was designed to target a highly conserved region of the N gene (Forward primer: ATGCTGCAATCGTGCTACAA (SEQ ID NO: 190); Reverse primer: GACTGCCGCCTCTGCTC (SEQ ID NO: 191); Probe: /56-FAM/TCAAGGAAC/ZEN/AACATTGCCAA/3IABKFQ/) (SEQ ID NO: 192). This region was included in an RNA standard to allow for copy number determination down to 10 copies per reaction. The reaction mixture contained final concentrations of primers and probe of 500 and 100 nM, respectively.

[0159] Cytokine and chemokine mRNA measurements. RNA was isolated from lung homogenates as described above. cDNA was synthesized from DNAse-treated RNA using the High-Capacity cDNA Reverse Transcription kit (Thermo Scientific) with the addition of RNase inhibitor following the manufacturer's protocol. Cytokine and chemokine expression was determined using TaqMan™ Fast Universal PCR master mix (Thermo Scientific) with commercial primers/probe sets specific for IFN-g (IDT: Mm.PT.58.41769240), IL-6 (Mm.PT.58.10005566), IL-1b (Mm.PT.58.41616450), Tnfa (Mm.PT.58.12575861), CXCL10 (Mm.PT.58.43575827), CCL2 (Mm.PT.58.42151692), CCL5 (Mm.PT.58.43548565), CXCL11(Mm.PT.58.10773148.g), Ifnb (Mm.PT.58.30132453.g), CXCLI (Mm.PT.58.42076891) and results were normalized to GAPDH (Mm.PT.39a.1) levels. Fold change was determined using the 2^{-ΔΔCt} method comparing treated mice to naïve controls.

[0160] Lung Pathology. Animals were euthanized before harvest and fixation of tissues. The left lung was first tied off at the left main bronchus and collected for viral RNA analysis. The right lung was inflated with approximately 1.2 mL of 10% neutral buffered formalin using a 3-mL syringe and catheter inserted into the trachea. Tissues were embedded in paraffin, and sections were stained with hematoxylin and eosin. Slides were scanned using a Hamamatsu NanoZoomer™ slide scanning system, and images were viewed using NDP view software (ver.1.2.46).

[0161] Respiratory mechanics. Mice were anesthetized with ketamine/xylazine (100 mg/kg and 10 mg/kg, i.p., respectively). The trachea was isolated via dissection of the neck area and cannulated using an 18-gauge blunt metal cannula (typical resistance of 0.18 cmH₂O·s/mL), which was secured in place with a nylon suture. The mouse then was connected to the flexiVent™ computer-controlled piston ventilator (SCIREQ Inc.) via the cannula, which was attached to the FX adaptor Y-tubing. Mechanical ventilation was initiated, and mice were given an additional 100 mg/kg of ketamine and 0.1 mg/mouse of the paralytic pancuronium bromide via intraperitoneal route to prevent breathing against the ventilator and during measurements. Mice were ventilated using default settings for mice, which consisted in a positive end expiratory pressure at 3 cm H₂O, a 10 mL/kg tidal volume (Vt), a respiratory rate at 150 breaths per minute (bpm), and a fraction of inspired oxygen (FiO₂) of 0.21 (i.e., room air). Respiratory mechanics were assessed using the forced oscillation technique, as previously described (McGovern et al., 2013), using the latest version of the flexiVent™ operating software (flexiWare v8.1.3). Pressure-volume loops and measurements of inspiratory capacity also were performed.

[0162] Neutralization assay. Serial dilutions of binder proteins were incubated with 10² focus-forming units (FFU) of SARS-COV-2 for 1 h at 37° C. Binder-virus complexes were added to Vero E6 (WA1/2020) or Vero-hACE2-TMPRSS2 (B.1.1.7 and WA1/2020 E484K/N501Y/D614G) cell monolayers in 96-well plates and incubated at 37° C. for 1 h. Subsequently, cells were overlaid with 1% (w/v) methylcellulose in MEM supplemented with 2% FBS. Plates were harvested 24-30 h later by removing overlays and fixed with 4% PFA in PBS for 20 min at room temperature. Plates were washed and sequentially incubated with an oligoclonal pool of SARS2-2, SARS2-11, SARS2-16, SARS2-31, SARS2-38, SARS2-57, and SARS2-71 anti-spike protein antibodies (Zhou et al., 2021) and HRP-conjugated goat anti-mouse IgG in PBS supplemented with 0.1% saponin and 0.1% bovine serum albumin. SARS-COV-2-infected cell foci were visualized using TrueBlue™ peroxidase substrate (KPL) and quantitated on an ImmunoSpot™ microanalyzer (Cellular Technologies). Data were processed using Prism™ S software (GraphPad Prism™ 8.0).

[0163] ELISA. C-terminal biotinylated LCB1.1v3 was immobilized on streptavidin-coated plates (RayBiotech #7C-SCP-1) at 2.5 μg/mL in 100 μL total volume per well and incubated at 4° C. overnight. Plates were washed with wash buffer (TBS+0.1% (w/v) BSA+0.05% (v/v) Tween20) and blocked with 200 μL/well blocking buffer (TBS+2% (w/v) BSA+0.05% (v/v) Tween20) for 1 h at room temperature. Plates were rinsed with wash buffer using 200 μL/well, and 100 μL of 1:100 diluted sera samples in blocking buffer were added to respective wells. For a positive control, Fc-RBD was serially diluted 1:5 starting at 240 ng/ml in 100 μL of blocking buffer. All samples were incubated for 1 h at room temperature. Plates were washed using 200 μL/well of wash buffer. For the serum samples, HRP-conjugated horse anti-mouse IgG antibody (Vector Laboratories #PI-2000-1) was diluted 1:200 in blocking buffer, and 100 μL was incubated in each well at room temperature for 30 min. For the positive control, HRP-conjugated mouse anti-human IgG antibody (Invitrogen #05-4220) was diluted 1:500 in blocking buffer, and 100 μL was incubated in each well at room temperature for 30 min. Plates were rinsed with wash buffer, and 100 μL of TMB (SeraCare) was added to each well for 2 min. The reaction was quenched by adding 100 μL of 1N HCl. Optical densities were determined at 450 nm on a Synergy Neo21M plate reader (BioTek Instruments).

[0164] Quantification and Statistical Analysis

[0165] Statistical significance was assigned when P values were <0.05 using Prism™ Version 8 (GraphPad). Tests, number of animals, median values, and statistical comparison groups are indicated in each of the Figure legends. Analysis of weight change was determined by two-way ANOVA. Changes in functional parameters or immune parameters were compared to control binder-treated animals and analyzed by one-way ANOVA with multiple comparisons tests. Statistical analyses of viral burden between two groups were determined by Mann-Whitney test.

### REFERENCES

[0166] Cao, L. X., Goreshnik, I., Coventry, B., Case, J. B., Miller, L., Kozodoy, L., Chen, R. E., Carter, L., Walls, A. C., Park, Y. J., et al. (2020). De novo design of picomolar SARS-COV-2 miniprotein inhibitors. Science 370.
[0167] Case, J. B., Bailey, A. L., Kim, A. S., Chen, R. E., and Diamond, M. S. (2020). Growth, detection, quantification, and inactivation of SARS-COV-2. Virology 548, 39-48. Chen, R., Zhang, X., Case, J. B., Winkler, E., Liu, Y., Vanblargan, L., Liu, J., Errico, J., Xie, X., Suryadevara, N., et al. (2021). Resistance of SARS-COV-2 variants to neutralization by monoclonal and serum-derived polyclonal antibodies (Research Square).
[0168] Chevalier, A., Silva, D. A., Rocklin, G. J., Hicks, D. R., Vergara, R., Murapa, P., Bernard, S. M., Zhang, L., Lam, K. H., Yao, G., et al. (2017). Massively parallel de novo protein design for targeted therapeutics. Nature 550, 74-79.
[0169] Day, M. (2020). Covid-19: identifying and isolating asymptomatic people helped eliminate virus in Italian village. BMJ 368, m1165.
[0170] Galloway, S. E., Paul, P., MacCannell, D. R., Johansson, M. A., Brooks, J. T., MacNeil, A., Slayton, R. B., Tong, S., Silk, B. J., Armstrong, G. L., et al. (2021). Emergence of SARS-COV-2 B.1.1.7 Lineage-United States, Dec. 29, 2020-Jan. 12, 2021. MMWR Morb Mortal Wkly Rep 70, 95-99.
[0171] Golden, J. W., Cline, C. R., Zeng, X., Garrison, A. R., Carey, B. D., Mucker, E. M., White, L. E., Shamblin, J. D., Brocato, R. L., Liu, J., et al. (2020). Human angiotensin-converting enzyme 2 transgenic mice infected with SARS-COV-2 develop severe and fatal respiratory disease. JCI Insight 5.
[0172] Hassan, A. O., Case, J. B., Winkler, E. S., Thackray, L. B., Kafai, N. M., Bailey, A. L., McCune, B. T., Fox, J. M., Chen, R. E., Alsoussi, W. B., et al. (2020). A SARS-COV-2 Infection Model in Mice Demonstrates Protection by Neutralizing Antibodies. Cell 182, 744-753 e744. Hoagland, D. A., Møller, R., Uhl, S. A., Oishi, K., Frere, J., Golynker, I., Horiuchi, S., Panis, M., Blanco-Melo, D., Sachs, D., et al. (2021). Leveraging the antiviral type I interferon system as a first line of defense against SARS-COV-2 pathogenicity. Immunity.
[0173] Hoffmann, M., Kleine-Weber, H., Schroeder, S., Kruger, N., Herrler, T., Erichsen, S., Schiergens, T. S., Herrler, G., Wu, N. H., Nitsche, A., et al. (2020). SARS-COV-2 Cell Entry Depends on ACE2 and TMPRSS2 and Is Blocked by a Clinically Proven Protease Inhibitor. Cell 181, 271.
[0174] Jeyanathan, M., Afkhami, S., Smaill, F., Miller, M. S., Lichty, B. D., and Xing, Z. (2020). Immunological considerations for COVID-19 vaccine strategies. Nat Rev Immunol 20, 615-632.
[0175] Johnson, K. D., Harris, C., Cain, J. K., Hummer, C., Goyal, H., and Perisetti, A. (2020). Pulmonary and Extra-Pulmonary Clinical Manifestations of COVID-19. Front Med (Lausanne) 7, 526.
[0176] Kang, T. H., and Jung, S. T. (2019). Boosting therapeutic potency of antibodies by taming Fc domain functions. Exp Mol Med 51, 1-9.
[0177] Kordzadeh-Kermani, E., Khalili, H., and Karimzadeh, I. (2020). Pathogenesis, clinical manifestations and complications of coronavirus disease 2019 (COVID-19). Future Microbiol 15, 1287-1305.
[0178] Krammer, F. (2020). SARS-COV-2 vaccines in development. Nature 586, 516-527. Letko, M., Marzi, A., and Munster, V. (2020). Functional assessment of cell entry and receptor usage for SARS-COV-2 and other lineage B betacoronaviruses. Nat Microbiol 5, 562.
[0179] Leung, K., Shum, M. H., Leung, G. M., Lam, T. T., and Wu, J. T. (2021). Early transmissibility assessment of the N501Y mutant strains of SARS-COV-2 in the United Kingdom, October to November 2020. Euro Surveill 26.
[0180] Li, R., Pei, S., Chen, B., Song, Y., Zhang, T., Yang, W., and Shaman, J. (2020). Substantial undocumented infection facilitates the rapid dissemination of novel coronavirus (SARS-COV-2). Science 368, 489-493.
[0181] Matsuyama, S., Nao, N., Shirato, K., Kawase, M., Saito, S., Takayama, I., Nagata, N., Sekizuka, T., Katoh, H., Kato, F., et al. (2020). Enhanced isolation of SARS-COV-2 by TMPRSS2-expressing cells. Proc Natl Acad Sci USA 117, 7001-7003.
[0182] McGovern, T. K., Robichaud, A., Fereydoonzad, L., Schuessler, T. F., and Martin, J. G. (2013). Evaluation of respiratory system mechanics in mice using the forced oscillation technique. J Vis Exp, e50172.
[0183] Mukherjee, S., Sirohi, D., Dowd, K. A., Chen, Z., Diamond, M. S., Kuhn, R. J., and Pierson, T. C. (2016). Enhancing dengue virus maturation using a stable furin over-expressing cell line. Virology 497, 33-40.
[0184] Schafer, A., Muecksch, F., Lorenzi, J. C. C., Leist, S. R., Cipolla, M., Bournazos, S., Schmidt, F., Maison, R. M., Gazumyan, A., Martinez, D. R., et al. (2021). Antibody potency, effector function, and combinations in protection and therapy for SARS-COV-2 infection in vivo. J Exp Med 218.
[0185] Standl, F., Jöckel, K. H., Brune, B., Schmidt, B., and Stang, A. (2020). Comparing SARS-CoV-2 with SARS-COV and influenza pandemics. Lancet Infect Dis.
[0186] Tegally, H., Wilkinson, E., Giovanetti, M., Iranzadeh, A., Fonseca, V., Giandhari, J., Doolabh, D., Pillay, S., San, E. J., Msomi, N., et al. (2020). Emergence and rapid spread of a new severe acute respiratory syndrome-related coronavirus 2 (SARS-COV-2) lineage with multiple spike mutations in South Africa (Cold Spring Harbor Laboratory).
[0187] Voloch, C. M., Silva F, R. D., De Almeida, L. G. P., Cardoso, C. C., Brustolini, O. J., Gerber, A. L., Guimarães, A. P. D. C., Mariani, D., Costa, R. M. D., Ferreira, O. C., et al. (2020). Genomic characterization of a novel SARS-COV-2 lineage from Rio de Janeiro, Brazil (Cold Spring Harbor Laboratory).
[0188] Wang, P., Nair, M. S., Liu, L., Iketani, S., Luo, Y., Guo, Y., Wang, M., Yu, J., Zhang, B., Kwong, P. D., et al. (2021a). Antibody Resistance of SARS-COV-2 Variants B.1.351 and B.1.1.7 (Cold Spring Harbor Laboratory).
[0189] Wang, Z., Schmidt, F., Weisblum, Y., Muecksch, F., Barnes, C. O., Finkin, S., Schaefer-Babajew, D., Cipolla, M., Gaebler, C., Lieberman, J. A., et al. (2021b). mRNA vaccine-elicited antibodies to SARS-COV-2 and circulating variants. Nature.
[0190] Wibmer, C. K., Ayres, F., Hermanus, T., Madzivhandila, M., Kgagudi, P., Lambson, B. E., Vermeulen, M., Van Den Berg, K., Rossouw, T., Boswell, M., et al. (2021). SARS-COV-2 501Y. V2 escapes neutralization by South African COVID-19 donor plasma (Cold Spring Harbor Laboratory).
[0191] Winkler, E. S., Bailey, A. L., Kafai, N. M., Nair, S., McCune, B. T., Yu, J., Fox, J. M., Chen, R. E., Earnest, J. T., Keeler, S. P., et al. (2020a). SARS-COV-2 infection of human ACE2-transgenic mice causes severe lung inflammation and impaired function. Nat Immunol 21, 1327-1335.
[0192] Winkler, E. S., Gilchuk, P., Yu, J., Bailey, A. L., Chen, R. E., Zost, S. J., Jang, H., Huang, Y., Allen, J. D., Case, J. B., et al. (2020b). Human neutralizing antibodies against SARS-COV-2 require intact Fc effector functions and monocytes for optimal therapeutic protection. Cell. In press.
[0193] Xie, X., Liu, Y., Liu, J., Zhang, X., Zou, J., Fontes-Garfias, C. R., Xia, H., Swanson, K. A., Cutler, M., Cooper, D., et al. (2021a). Neutralization of SARS-COV-2 spike 69/70 deletion, E484K and N501Y variants by BNT162b2 vaccine-elicited sera. Nature Medicine.
[0194] Xie, X., Liu, Y., Liu, J., Zhang, X., Zou, J., Fontes-Garfias, C. R., Xia, H., Swanson, K. A., Cutler, M., Cooper, D., et al. (2021b). Neutralization of SARS-COV-2 spike 69/70 deletion, E484K and N501Y variants by BNT162b2 vaccine-elicited sera. Nat Med.
[0195] Zhou, D., Fuk-Woo Chan, J., Zhou, B., Zhou, R., Li, S., Shan, S., Liu, L., Zhang, A. J., Chen, S. J., Chung-Sing Chan, C., et al. (2021). Robust SARS-COV-2 Infection in Nasal Turbinates after Treatment with Systemic Neutralizing Antibodies. Cell Host & Microbe.
[0196] Zhou, F., Yu, T., Du, R., Fan, G., Liu, Y., Liu, Z., Xiang, J., Wang, Y., Song, B., Gu, X., et al. (2020). Clinical course and risk factors for mortality of adult inpatients with COVID-19 in Wuhan, China: a retrospective cohort study. Lancet 395, 1054-1062.

[0197] Multivalent Designs

[0198] Escape variants of SARS-COV-2 are threatening to considerably prolong the COVID-19 pandemic. Here we develop multivalent minibinders as potential prophylactic and therapeutic agents to address this problem. We designed multivalent minibinders containing three copies of a minibinder (self-assembled homotrimer), or three linked distinct minibinders (multi-domain fusion) targeting different sites, geometrically matched to the spike trimer and optimized their composition using a rapid cell-free expression and evaluation workflow. The optimized designs have greatly slowed dissociation rates from the SARS-COV-2-S-glycoprotein with complex half-lives of more than two weeks. Cryo-EM of the structures reveal that both homotrimer and fusion minibinder constructs can engage all three RBDs on a single spike protein. The top trimeric and fusion candidates neutralize the wild-type SARS-CoV-2 virus in addition to the B.1.1.7, B.1.351, B.1.1.28 variants of concern with IC₅₀s in the low pM range. Additionally, the top homotrimer candidate provided prophylactic protection in a human ACE2-expressing transgenic mice against the same variant strains. Our approach highlights the utility of computational protein design coupled to rapid experimental prototyping to design potent multivalent inhibitors that can broadly neutralize widely circulating variants of concern.

[0199] We sought to develop multivalent versions of our computationally designed miniproteins that block the SARS-COV-2 receptor binding domain (RBD) interaction with its host receptor ACE2. In principle, the small size of the designed minibinders enables simultaneous engagement of multiple RBDs within a single spike protein trimer. We hypothesized that this multivalent binding would lead to ultra-high affinity inhibitors that are more resistant to escape mutations than their monomeric counterparts. The resulting avidity from these multivalent interactions could ameliorate the effects of mutations that would escape individual domains. Additionally, single proteins containing domains targeting multiple distinct epitopes or containing different sets of contacts with the target epitope could further increase the robustness of the designs to mutational escape. Starting with the LCB1, AHB2, and LCB3 minibinders (hereafter referred to as M1, M2, and M3 respectively; Table 11) and their known binding modes we pursued two parallel strategies for designing multivalent inhibitors, self-assembled homotrimers and multi-domain fusions.

TABLE 11
List of abbreviations used to describe
multivalent minibinders

| ID | Protein |
|---|---|
| M1 | LCB1_v2.2 |
| M2 | AHB2 |
| M3 | LCB3_v2.2 |
| F23-P12 | AHB2_v2-PAS12-LCB3_v2.2 |
| F31-P12 | LCB3_v2.2-PAS12-LCB1_v2.2 |
| F231- | AHB2_v2-PAS12-LCB3_v2.2-PAS12- |
| P12 | LCB1_v2.2 |
| F231- | AHB2_v2-PAS24-LCB3_v2.2-PAS24- |
| P24 | LCB1_v2.2 |
| F23-G10 | AHB2_v2-GS10-LCB3_v2.2 |
| F31-F10 | LCB3_v2.2-GS10-LCB1_v2.2 |
| F231- | AHB2_v2-GS10-LCB3_v2.2-GS10- |
| G10 | LCB1_v2.2 |
| H1-1 | SB175-6GS-LCB1_v2.2 |
| H2-0 | AHB2-4GS-1rfo |
| H2-1 | AHB2-2GS-SB175 |
| H3-1 | LCB3_v2.2-6GS-SB175 |

[0200] To enable rapid prototyping of the designed proteins, we developed a cell-free DNA assembly and protein expression workflow enabling a greatly shortened design-build-test cycle better matched to the urgency of a pandemic. The workflow combines a cell-free DNA assembly step utilizing Gibson assembly followed by PCR to generate linear expression templates that are used to drive cell-free protein synthesis (CFPS). The developed workflow allows us to translate synthetic DNA to purified protein in as little as 6 hours, is easily scaled to high-throughput formats (e.g., 96- or 384-well plates), and is amenable to automated liquid handling. Furthermore, we coupled this cell-free workflow to an AlphaLISA protein-protein interaction (PPI) competition assay to enable comparison of dissociation rates of the designed proteins against either the monomeric RBD or the trimeric hexapro SARS-COV-2-S-glycoprotein (S6P). Because multivalency largely only impacts the dissociation rate constant of the interaction, we reasoned that an in-solution off-rate screen would enable us to distinguish mono- from multi-valent binding. The resulting workflow can evaluate hundreds of candidate multivalent proteins per week.

[0201] Design and validation of multivalent binders

[0202] In the first strategy, we designed self-assembling trimeric versions of the M1, M2, and M3 miniproteins geometrically matched to the three RBDs in the spike trimer (hereafter referred to as H[binding domain #]-[homotrimer #]; for example, H₁-1 represents a homotrimer of M1 with homotrimerization domain 1, Table 11). We designed, expressed, and evaluated more than one hundred different proteins containing various homotrimerization domains and linker lengths using our cell-free expression and multivalency screen workflow. We identified versions of each homotrimer that showed slow dissociation rates potentially indicating multivalent binding (FIG. 14).

[0203] In the second strategy, we generated two- and three-domain fusions of the M1, M2 and M3 binding domains separated by flexible linkers (hereafter referred to as F[binding domain #s]-[linker]; for example, F231-P12 represents a fusion of M2 to M3 to M1 all separated by a PAS12 linker, Table 11). We evaluated a range of linker lengths chosen to span the distances between the termini of the domains when bound to the “open” and “closed” states of the RBD. We again expressed and evaluated more than one hundred different designs varying binding domain connectivity and linker length to optimize multivalency. Several identified two- and three-domain fusions show slow dissociation rates comparable to the homo-trimeric constructs described above (FIG. 14).

[0204] The best candidates from each strategy showed little to no dissociation after 14 days of with competitor, with further measurements being limited by the stability of S6P. From these data we estimate the complex has a dissociation rate constant of slower than 1 ×10⁻⁷ s⁻¹. To our knowledge, these are the slowest measured dissociation rate constant for a synthetic protein-protein interactions ever reported.

[0205] We next used single particle cryo-electron microscopy (cryo-EM) to characterize the complex between S6P and the top candidate minibinders constructs (FIG. 15). The Cryo-EM structures of the H₂-1, F31-G10, and the F231-P24 constructs were determined at resolutions of 2.6, 4.5, and 3.9 Å respectively. H₂-1 was found to simultaneously engage all three RBDs, causing all three RBDs to adopt the open state. The design model accurately closely matches the observed structure. F31-G10 bound to two RBDs, both appearing to adopt the open conformation upon binding. The structure indicates this linker length enabled simultaneous binding of two RBDs in their native state. The third free RBD adopted either the open or closed conformation in the structure. F231-P24 bound to three RBDs, with M1 binding a closed conformation RBD and M2 and M3 binding to open conformation RBDs. This suggests the linker length is sufficiently long enough to enable all three binding domains to simultaneously engage all three RBDs without significant distortion of the native state. In both F31-G10 and F231-P24 the maps are highly suggestive of multivalent binding, though the flexible linkers yield no density in the EM map to confirm linkage of the domains.

[0206] Multivalent Minibinders Neutralize Widely Circulating SARS-CoV-2 Variants

[0207] We next sought to determine ability of the multivalent constructs to neutralize SARS-CoV-2 variants. We screened the off rate of the best multivalent minibinders against a panel of mutant spike proteins (FIG. 16). The homotrimers showed the most mutational resistance, with the H₂ homotrimers showing little dissociation after 24 hours against any of the mutant spikes. The two-domain fusions showed little increased resilience to the tested point mutants. The three-domain fusions showed considerably more consistent binding to the tested point mutants, though some still impacted binding.

[0208] We additionally evaluated the potency of these proteins via neutralization assays against both a SARS-COV-2 HIV pseudovirus in addition to authentic SARS-COV-2 isolates (FIG. 16). The H2-0 and H2-1 homotrimers consistently performed the best across all constructs tested, with IC₅₀s in the low pM range. The three-domain fusions also performed well, with IC₅₀s in the sub nM range for all tested variants. The greater neutralization breadth of the H₂ homotrimers likely reflects the closer mimicking if the ACE2 binding site by the M2 monomer, a unique advantage enabled by protein design.

[0209] Multivalent Minibinders Resist Viral Escape

[0210] In addition to evaluating the top candidate's ability to neutralize currently circulating SARS-COV-2 mutants, we also tested the ability of the inhibitors to resist escape viral escape (FIG. 17). To do this, plaque assays were performed with a VSV-SARS-COV-2 chimera virus were replicated on Vero E6 cells. To select mutants that were resistant to the inhibitor, the inhibitor was included in the overlay to halt replication of non-resistant viruses. In positive control neutralizing antibody (2B04), multiple escape mutants were selected per plate. For both F231-P12 and H₂-1 no escape mutants were isolated in 35 replicate wells of each inhibitor.

[0211] H₂-0 Provides Prophylactic Protection in Human ACE2-Expressing Transgenic Mice

[0212] To determine the ability of our multivalent minibinders to protect in an in vivo model, we evaluated them as a pre-exposure prophylactic treatment in human ACE2-expressing transgenic mice (FIG. 17). A single 50 μg dose of H₂-0 was administered intranasally (i.n.) one day prior to inoculation with 10³ focus forming units of SARS-COV-2 Variants B.1.1.7, B1.351, B.1.1.24. In all cases, i.n. administration of H₂-0 protected the mice against SARS-CoV-2-induced weight loss. At 6 days post infection viral burden was determined via RT-qPCR in a variety in tissues. Notably, viral loads in the lungs were reduced in all cases. These results indicate that H₂-0 given via i.n. administration can provide prophylactic protection against SARS-COV-2 infection in a relevant mouse model.

### CONCLUSIONS

[0213] We anticipate that the cell-free protein expression and evaluation workflow will find utility in many different applications where the evaluation of individual protein variants is the limiting process step. In addition, our developed multivalency screen will accelerate the ability of researchers to develop multivalent protein therapeutics.

[0214] The designed protein constructs could have a number of advantages over monoclonal antibodies for preventing and treating COVID-19 infection. 1) direct administration into respiratory system, 2) low cost of goods and amenability to very large-scale production, 3) high stability and lack of need for cold chain, and 4) very broad resistance to escape mutants in single compounds. More generally, designed high affinity multivalent minibinders could provide a powerful platform for combating viral pandemics.

1. A polypeptide comprising an amino acid sequence at least 50% identical to the amino acid sequence selected from the group consisting of SEQ ID NOS: 1-17, 19-21, 23-34 and 100-101, wherein the polypeptide binds to SARS-COV-2 Spike glycoprotein receptor binding domain (RBD).

2. The polypeptide of claim 1, wherein amino acid substitutions relative to the reference polypeptide amino acid sequence are selected from the exemplary amino acid substitutions provided in Table 1, and/or wherein interface residues are identical to those in the reference polypeptide or are conservatively substituted relative to interface residues in the reference polypeptide.

3.-4. (canceled)

5. The polypeptide of claim 1, comprising an amino acid sequence at least 50%, 55%, 60%, 65%, 70%, 75%, 80%, 85%, 90%, 91%, 92%, 93%, 94%, 95%, 96%, 97%, 98%, 99%, or 100% identical to the amino acid sequence selected from the group consisting of SEQ ID NOS:1-10 and 102-136.

6. The polypeptide of claim 5, wherein the polypeptide comprises an amino acid substitution relative to the amino acid sequence of SEQ ID NO:1 at 1, 2, 3, 4, 5, 6, 7, 8, 9, 10, 11, 12, 13, 14, 15, 16, 17, or all 18 residues selected from the group consisting of 2, 4, 5, 14, 15, 17, 18, 27, 28, 32, 37, 38, 39, 41, 42, 49, 52, and 55, optionally wherein the substitutions are selected from the substitutions listed in Table 4, either individually or in combinations in a given row.

7. (canceled)

8. The polypeptide of any claim 1, comprising an amino acid sequence at least 50% identical to the amino acid sequence selected from the group consisting of SEQ ID NOS: 13-17, 19-21 and 137-163.

9. The polypeptide of claim 8, wherein the polypeptide comprises an amino acid substitution relative to the amino acid sequence of SEQ ID NO:13 at 1, 2, 3, 4, 5, 6, 7, 8, 9, 10, 11, 12, 13, 14, 15, 16, 17, 18, 19, or all 20 residues selected from the group consisting 2, 6, 8, 9, 13, 14, 19, 22, 25, 26, 28, 29, 34, 35, 37, 40, 43, 45, 49, and 62, optionally wherein the substitutions are selected from the substitutions listed in Table 6, either individually or in combinations in a given row.

10. (canceled)

11. The polypeptide of claim 1, comprising an amino acid sequence at least 50% identical to the amino acid sequence selected from the group consisting of SEQ ID NOS:33-34 and 100-101 and 164, optionally wherein the polypeptide comprises an amino acid substitution relative to the amino acid sequence of SEQ ID NO:101 at or both residues selected from the group consisting 63 and 75.

12.-15. (canceled)

16. The polypeptide of claim 1, comprising two or more copies of the amino acid sequence at least 50%; identical to the amino acid sequence selected from the group consisting of SEQ ID NOS: 1-17, 19-21, 23-34 and 100-101.

17.-25. (canceled)

26. The polypeptide of claim 16, wherein the polypeptide comprises the formula Z1-Z2-Z3, wherein:
Z1 comprises an amino acid sequence at least 50% identical to the amino acid sequence selected from the group consisting of SEQ ID NOS: 1-17, 19-21, 23-34 and 100-164;
Z2 comprises an optional amino acid linker; and
Z3 comprises an amino acid sequence at least 50% identical to the amino acid sequence selected from the group consisting of SEQ ID NOS: 1-17, 19-21, 23-34 and 100-164;
wherein Z1 and Z3 may be identical or different.

27.-34. (canceled)

35. The polypeptide of claim 26, wherein the polypeptide comprises the formula B1-B2-Z1-Z2-Z3-B3-B4, wherein:
Z1, Z2, and Z3 are as defined in claim 26;
B2 and B3 comprise optional amino acid linkers; and
one or both of B1 and B4 independently comprise an amino acid sequence at least 50%, 55%, 60%, 65%, 70%, 75%, 80%, 85%, 90%, 91%, 92%, 93%, 94%, 95%, 96%, 97%, 98%, 99%, or 100% identical to the amino acid sequence selected from the group consisting of SEQ ID NOS: 1-17, 19-21, 23-34 and 100-164, wherein one of B1 and B4 may be absent.

36.-45. (canceled)

46. The polypeptide of claim 1, comprising an amino acid sequence at least 50% identical to the amino acid sequence selected from the group consisting of SEQ ID NOS:47-60,193-355, and 454-588 and a genus selected from those recited in the right hand column of Table 8 wherein genus positions X1, X2, X3, and X4 may be present or absent, and when present may be any sequence of 1 or more amino acids and wherein any N-terminal methionine residues may be present or absent in the polypeptide, and wherein residues in parentheses may be present or absent and are not considered in determining percent identity.

47. The polypeptide of claim 1, further comprising an additional functional peptide domain.

48.-53. (canceled)

54. The polypeptide of claim 1, wherein the polypeptide is linked to a stabilization domain.

55. The polypeptide of claim 1, comprising an amino acid sequence at least 50% identical to the amino acid sequence selected from the group consisting of SEQ ID NOS: 65-96, wherein in embodiments where a secretion signal is present (MARAWIFFLLCLAGRALA; SEQ ID NO:63) it can be replaced with any other secretion signal.

56. (canceled)

57. A nucleic acid encoding the polypeptide of claim 1.

58. An expression vector comprising the nucleic acid of claim 57 operatively linked to a promoter.

59. A host cell comprising the expression vector of claim 58.

60. An oligomer of the polypeptide of claim 1, or a composition, comprising 2 or more copies of the polypeptide of claim 1 attached to a support.

61.-62. (canceled)

63. A pharmaceutical composition, comprising the polypeptide of claim 1, and a pharmaceutically acceptable carrier.

64. A method for treating or limiting development of a severe acute respiratory syndrome (SARS) coronavirus infection (including SARS-Co-V and SARS-COV-2), comprising administering to a subject in need thereof an amount of the polypeptide of claim 1 effective to treat or limit development of the infection.

65.-72. (canceled)

The application's sequence listing, which the Patent Office published only in electronic form, follows.

SEQUENCE LISTING (701 sequences)

SEQ ID NO: 1 - protein, 56 aa, Artificial Sequence
  Synthetic
DKEWILQKIYEIMRLLDELGHAEASMRVSDLIYEFMKKGDERLLEEAERLLEEVER

SEQ ID NO: 2 - protein, 56 aa, Artificial Sequence
  Synthetic
DKEEILNKIYEIMRLLDELGNAEASMRVSDLILEFMKKGDERLLEEAERLLEEVER

SEQ ID NO: 3 - protein, 56 aa, Artificial Sequence
  Synthetic
DKEWILQKIYEIMRLLDELGHAEASMRVSDLIYEFMKQGDERLLEEAERLLEEVER

SEQ ID NO: 4 - protein, 56 aa, Artificial Sequence
  Synthetic
DKENILQKIYEIMKTLDQLGHAEASMQVSDLIYEFMKQGDERLLEEAERLLEEVER

SEQ ID NO: 5 - protein, 56 aa, Artificial Sequence
  Synthetic
DKENILQKIYEIMKTLDQLGHAEASMNVSDLIYEFMKQGDERLLEEAERLLEEVER

SEQ ID NO: 6 - protein, 57 aa, Artificial Sequence
  Synthetic
DKENILQKIYEIMKTLDQLGHAEASMQVSDLIYEFMKQGDERLLEEAERLLEEVERC

SEQ ID NO: 7 - protein, 56 aa, Artificial Sequence
  Synthetic
DKENILQKIYEIMKTLDQLGHAEASMYVSDLIYEFMKQGDERLLEEAERLLEEVER

SEQ ID NO: 8 - protein, 56 aa, Artificial Sequence
  Synthetic
DKENILQKIYEIMKTLEQLGHAEASMQVSDLIYEFMKQGDERLLEEAERLLEEVER

SEQ ID NO: 9 - protein, 56 aa, Artificial Sequence
  Synthetic
DKENILQKIYEIMKTLEQLGHAEASMQVSDLIYEFMKQGDENLLEEAEQLLQEVER

SEQ ID NO: 10 - protein, 56 aa, Artificial Sequence
  Synthetic
DKENILQKIYEIMKTLEQLGHAEASMNVSDLIYEFMKQGDERLLEEAERLLEEVER

SEQ ID NO: 11 - protein, 56 aa, Artificial Sequence
  Synthetic
SDDEDSVRYLLYMAELRYEQGNPEKAKKILEMAEFIAKRNNNEELERLVREVKKRL

SEQ ID NO: 12 - protein, 56 aa, Artificial Sequence
  Synthetic
SDDEDAVRYLLYMAELLYKQGNPEEAKKLLELAEFIAKRNNNEELERLVREVKKRL

SEQ ID NO: 13 - protein, 64 aa, Artificial Sequence
  Synthetic
NDDELHMLMTDLVYEALHFAKDEEIKKRVFQLFELADKAYKNNDRQKLEKVVEELKELLERLLS

SEQ ID NO: 14 - protein, 63 aa, Artificial Sequence
  Synthetic
NDDELLMLVTDLVAEALLFAKDEEIKKRVFTLFELADKAYKNNDRDTLSKVVSELKELLERLQ

SEQ ID NO: 15 - protein, 64 aa, Artificial Sequence
  Synthetic
NDDELHMQMTDLVYEALHFAKDEEIQKHVFQLFEKATKAYKNKDRQKLEKVVEELKELLERLLS

SEQ ID NO: 16 - protein, 64 aa, Artificial Sequence
  Synthetic
NDDELHMQMTDLVYEALHFAKDEEIQKHVFQLFENATKAYKNKDRQKLEKVVEELKELLERLLS

SEQ ID NO: 17 - protein, 64 aa, Artificial Sequence
  Synthetic
NDDELHMQMTDLVYEALHFAKDEEFQKHVFQLFEKATKAYKNNDRQKLEKVVEELKELLERLLS

SEQ ID NO: 18 - skipped

SEQ ID NO: 19 - protein, 64 aa, Artificial Sequence
  Synthetic
NDDELHMQMTDLVYEALHFAKDEEFQKHVFQLFEKATKAYKNKDRQKLEKVVEELKELLERLLS

SEQ ID NO: 20 - protein, 64 aa, Artificial Sequence
  Synthetic
NDDELHMQMTDLVYEALHKAKDEEFQKHVFQLFEKATKARKNKDRQKLEKVVEELKELLERLLS

SEQ ID NO: 21 - protein, 64 aa, Artificial Sequence
  Synthetic
NDDELHMQMTDLVYEALHKAKDEEMQKRVFQLFEQADKAYKTKDRQKLEKVVEELKELLERLLS

SEQ ID NO: 22 - skipped

SEQ ID NO: 23 - protein, 56 aa, Artificial Sequence
  Synthetic
QREKRLKQLEMLLEYAIERNDPYLMFDVAVEMLRLAEENNDERIIERAKRILEEYE

SEQ ID NO: 24 - protein, 56 aa, Artificial Sequence
  Synthetic
DREERLKYLEMLLELAVERNDPYLIFDVAIELLRLAEENNDERIYERAKRILEEVE

SEQ ID NO: 25 - protein, 65 aa, Artificial Sequence
  Synthetic
SLEELKEQVKELKKELSPEMRRLIEEALRFLEEGNPAMAMMVLSDLVYQLGDPRVIDLYMLVTKT

SEQ ID NO: 26 - protein, 65 aa, Artificial Sequence
  Synthetic
SLEEVKEILKELKKELSPEDRRLIEEALRLLEEGNPAMASMVLSDLVFLLGDPRVIELLMLVTKT

SEQ ID NO: 27 - protein, 56 aa, Artificial Sequence
  Synthetic
DREQRLVRFLVRLASKFNLSPEQILQLFEVLEELLERGVSEEEIRKQLEEVAKELG

SEQ ID NO: 28 - protein, 55 aa, Artificial Sequence
  Synthetic
DREQRLVRFLVRLASKFNLSMEQILILFDVLEELLERGVSEEEIRKILEEVAKEL

SEQ ID NO: 29 - protein, 57 aa, Artificial Sequence
  Synthetic
DDDIRYLIYMAKLRLEQGNPEEAEKVLEMARFLAERLGMEELLKEVRELLRKIEELR

SEQ ID NO: 30 - protein, 57 aa, Artificial Sequence
  Synthetic
DDDVRYLIYMAKLLLEQGNPEEAEKVLESARFAAELLGNEELLKEVRELLRKIEELR

SEQ ID NO: 31 - protein, 65 aa, Artificial Sequence
  Synthetic
PIIELLREAKEKNDEFAISDALYLVNELLQRTGDPRLEEVLYLIWRALKEKDPRLLDRAIELFER

SEQ ID NO: 32 - protein, 65 aa, Artificial Sequence
  Synthetic
PVTELLREAKEKNDPMAISDALFLVFELAQRTGDPRLEEVLFLIWRALKEKDPRLLDRAIELFER

SEQ ID NO: 33 - protein, 85 aa, Artificial Sequence
  Synthetic
DEDLEELERLYRKAEEVAKEAKDASRRGDDERAKEQMERAMRLFDQVFELAQELQEKQTDGNRQKATHLDKAVKEAADELYQRVR

SEQ ID NO: 34 - protein, 85 aa, Artificial Sequence
  Synthetic
DEDLEELERLYRKAEEVAKEAEEASRRGDKERAKELLERALHLFDQVFELAQELQEKLTDEKRQKATHLDKAVHEAADELYQRVR

SEQ ID NO: 35 - protein, 4 aa, Artificial Sequence
  Synthetic
GSGS

SEQ ID NO: 36 - protein, 6 aa, Artificial Sequence
  Synthetic
GGSGGS

SEQ ID NO: 37 - protein, 11 aa, Artificial Sequence
  Synthetic
SGGSGGSGGSG

SEQ ID NO: 38 - protein, 12 aa, Artificial Sequence
  Synthetic
GGSGGSGSGGSG

SEQ ID NO: 39 - protein, 14 aa, Artificial Sequence
  Synthetic
GGSGSSGGSGSGSG

SEQ ID NO: 40 - protein, 15 aa, Artificial Sequence
  Synthetic
GGSGSGGSGSGSGGS

SEQ ID NO: 41 - protein, 15 aa, Artificial Sequence
  Synthetic
SGGSGSGSGGSGSGS

SEQ ID NO: 42 - protein, 24 aa, Artificial Sequence
  Synthetic
GGGSGGGSSGGSGGSSGGGSGGGS

SEQ ID NO: 43 - protein, 30 aa, Artificial Sequence
  Synthetic
GGGSGGGGSGGGGSGGGGSGGGGSGGGGSG

SEQ ID NO: 44 - protein, 36 aa, Artificial Sequence
  Synthetic
GGGSGGGSGGSGGSGGGSGGGSGSGGSGGGGSGGGS

SEQ ID NO: 45 - protein, 75 aa, Artificial Sequence
  Synthetic
GGGGSGGGGSGGGGSGGGGSGGGGSGGGGSGGGGSGGGGSGGGGSGGGGSGGGGSGGGGSGGGGSGGGGSGGGGS

SEQ ID NO: 46 - protein, 76 aa, Artificial Sequence
  Synthetic
SGGGGSGGGGSGGGGSGGGGSGGGGSGGGGSGGGGSGGGGSGGGGSGGGGSGGGGSGGGGSGGGGSGGGGSGGGGS

SEQ ID NO: 47 - protein, 118 aa, Artificial Sequence
  Synthetic
DKEWILQKIYEIMRLLDELGHAEASMRVSDLIYEFMKKGDERLLEEAERLLEEVERGGSGGSDKEWILQKIYEIMRLLDELGHAEASMRVSDLIYEFMKKGDERLLEEAERLLEEVER

SEQ ID NO: 48 - protein, 124 aa, Artificial Sequence
  Synthetic
DKEWILQKIYEIMRLLDELGHAEASMRVSDLIYEFMKKGDERLLEEAERLLEEVERGGSGGSGSGGSGDKEWILQKIYEIMRLLDELGHAEASMRVSDLIYEFMKKGDERLLEEAERLLEEVER

SEQ ID NO: 49 - protein, 136 aa, Artificial Sequence
  Synthetic
DKEWILQKIYEIMRLLDELGHAEASMRVSDLIYEFMKKGDERLLEEAERLLEEVERGGGSGGGSSGGSGGSSGGGSGGGSDKEWILQKIYEIMRLLDELGHAEASMRVSDLIYEFMKKGDERLLEEAERLLEEVER

SEQ ID NO: 50 - protein, 148 aa, Artificial Sequence
  Synthetic
DKEWILQKIYEIMRLLDELGHAEASMRVSDLIYEFMKKGDERLLEEAERLLEEVERGGGSGGGSGGSGGSGGGSGGGSGSGGSGGGGSGGGSDKEWILQKIYEIMRLLDELGHAEASMRVSDLIYEFMKKGDERLLEEAERLLEEVER

SEQ ID NO: 51 - protein, 187 aa, Artificial Sequence
  Synthetic
DKENILQKIYEIMKTLDQLGHAEASMQVSDLIYEFMKQGDERLLEEAERLLEEVERGGGGSGGGGSGGGGSGGGGSGGGGSGGGGSGGGGSGGGGSGGGGSGGGGSGGGGSGGGGSGGGGSGGGGSGGGGSDKENILQKIYEIMKTLDQLGHAEASMQVSDLIYEFMKQGDERLLEEAERLLEEVER

SEQ ID NO: 52 - protein, 187 aa, Artificial Sequence
  Synthetic
DKENILQKIYEIMKTLDQLGHAEASMQVSDLIYEFMKQGDERLLEEAERLLEEVERAGSGGSGGSGGSPVPSTPPTPSPSTPPTPSPSPVPSTPPTPSPSTPPTPSPSPVPSTPPTPSPSTPPTPSPSASGDKENILQKIYEIMKTLDQLGHAEASMQVSDLIYEFMKQGDERLLEEAERLLEEVER

SEQ ID NO: 53 - protein, 203 aa, Artificial Sequence
  Synthetic
NDDELHMQMTDLVYEALHFAKDEEIQKHVFQLFEKATKAYKNKDRQKLEKVVEELKELLERLLSGGGGSGGGGSGGGGSGGGGSGGGGSGGGGSGGGGSGGGGSGGGGSGGGGSGGGGSGGGGSGGGGSGGGGSGGGGSNDDELHMQMTDLVYEALHFAKDEEIQKHVFQLFEKATKAYKNKDRQKLEKVVEELKELLERLLS

SEQ ID NO: 54 - protein, 203 aa, Artificial Sequence
  Synthetic
NDDELHMQMTDLVYEALHFAKDEEIQKHVFQLFEKATKAYKNKDRQKLEKVVEELKELLERLLSAGSGGSGGSGGSPVPSTPPTPSPSTPPTPSPSPVPSTPPTPSPSTPPTPSPSPVPSTPPTPSPSTPPTPSPSASGNDDELHMQMTDLVYEALHFAKDEEIQKHVFQLFEKATKAYKNKDRQKLEKVVEELKELLERLLS

SEQ ID NO: 55 - protein, 195 aa, Artificial Sequence
  Synthetic
DKENILQKIYEIMKTLDQLGHAEASMQVSDLIYEFMKQGDERLLEEAERLLEEVERGGGGSGGGGSGGGGSGGGGSGGGGSGGGGSGGGGSGGGGSGGGGSGGGGSGGGGSGGGGSGGGGSGGGGSGGGGSNDDELHMQMTDLVYEALHFAKDEEIQKHVFQLFEKATKAYKNKDRQKLEKVVEELKELLERLLS

SEQ ID NO: 56 - protein, 195 aa, Artificial Sequence
  Synthetic
NDDELHMQMTDLVYEALHFAKDEEIQKHVFQLFEKATKAYKNKDRQKLEKVVEELKELLERLLSGGGGSGGGGSGGGGSGGGGSGGGGSGGGGSGGGGSGGGGSGGGGSGGGGSGGGGSGGGGSGGGGSGGGGSGGGGSDKENILQKIYEIMKTLDQLGHAEASMQVSDLIYEFMKQGDERLLEEAERLLEEVER

SEQ ID NO: 57 - protein, 130 aa, Artificial Sequence
  Synthetic
NDDELHMQMTDLVYEALHFAKDEEIQKHVFQLFEKATKAYKNKDRQKLEKVVEELKELLERLLSGGSGGSGGSGDKENILQKIYEIMKTLDQLGHAEASMQVSDLIYEFMKQGDERLLEEAERLLEEVER

SEQ ID NO: 58 - protein, 195 aa, Artificial Sequence
  Synthetic
DKENILQKIYEIMKTLDQLGHAEASMQVSDLIYEFMKQGDERLLEEAERLLEEVERAGSGGSGGSGGSPVPSTPPTPSPSTPPTPSPSPVPSTPPTPSPSTPPTPSPSPVPSTPPTPSPSTPPTPSPSASGNDDELHMQMTDLVYEALHFAKDEEIQKHVFQLFEKATKAYKNKDRQKLEKVVEELKELLERLLS

SEQ ID NO: 59 - protein, 195 aa, Artificial Sequence
  Synthetic
NDDELHMQMTDLVYEALHFAKDEEIQKHVFQLFEKATKAYKNKDRQKLEKVVEELKELLERLLSAGSGGSGGSGGSPVPSTPPTPSPSTPPTPSPSPVPSTPPTPSPSTPPTPSPSPVPSTPPTPSPSTPPTPSPSASGDKENILQKIYEIMKTLDQLGHAEASMQVSDLIYEFMKQGDERLLEEAERLLEEVER

SEQ ID NO: 60 - protein, 336 aa, Artificial Sequence
  Synthetic
DKEWILQKIYEIMRLLDELGHAEASMRVSDLIYEFMKKGDERLLEEAERLLEEVERGGSGSSGGSGSGSGDKEWILQKIYEIMRLLDELGHAEASMRVSDLIYEFMKKGDERLLEEAERLLEEVERGGSGSSGGSGSGSGDKEWILQKIYEIMRLLDELGHAEASMRVSDLIYEFMKKGDERLLEEAERLLEEVERGGSGSSGGSGSGSGDKEWILQKIYEIMRLLDELGHAEASMRVSDLIYEFMKKGDERLLEEAERLLEEVERGGSGSSGGSGSGSGDKEWILQKIYEIMRLLDELGHAEASMRVSDLIYEFMKKGDERLLEEAERLLEEVER

SEQ ID NO: 61 - protein, 22 aa, Artificial Sequence
  Synthetic
AKAKAKAKAKAKAKAKAKAKGG

SEQ ID NO: 62 - protein, 22 aa, Artificial Sequence
  Synthetic
GGAKAKAKAKAKAKAKAKAKAK

SEQ ID NO: 63 - protein, 18 aa, Artificial Sequence
  Synthetic
MARAWIFFLLCLAGRALA

SEQ ID NO: 64 - protein, 232 aa, Artificial Sequence
  Synthetic
EPKSSDKTHTCPPCPAPELLGGPSVFLFPPKPKDTLMISRTPEVTCVVVDVSHEDPEVKFNWYVDGVEVHNAKTKPREEQYNSTYRVVSVLTVLHQDWLNGKEYKCKVSNKALPAPIEKTISKAKGQPREPQVYTLPPSRDELTKNQVSLTCLVKGFYPSDIAVEWESNGQPENNYKTTPPVLDSDGSFFLYSKLTVDKSRWQQGNVFSCSVMHEALHNHYTQKSLSLSPGK

SEQ ID NO: 65 - protein, 79 aa, Artificial Sequence
  Synthetic
AKAKAKAKAKAKAKAKAKAKGGDKENILQKIYEIMKTLDQLGHAEASMQVSDLIYEFMKQGDERLLEEAERLLEEVERC

SEQ ID NO: 66 - protein, 79 aa, Artificial Sequence; identical to SEQ ID NO: 65
  Synthetic

SEQ ID NO: 67 - protein, 78 aa, Artificial Sequence
  Synthetic
DKENILQKIYEIMKTLEQLGHAEASMQVSDLIYEFMKQGDERLLEEAERLLEEVERGGAKAKAKAKAKAKAKAKAKAK

SEQ ID NO: 68 - protein, 310 aa, Artificial Sequence
  Synthetic
MARAWIFFLLCLAGRALADKEWILQKIYEIMRLLDELGHAEASMRVSDLIYEFMKKGDERLLEEAERLLEEVERGSGSEPKSSDKTHTCPPCPAPELLGGPSVFLFPPKPKDTLMISRTPEVTCVVVDVSHEDPEVKFNWYVDGVEVHNAKTKPREEQYNSTYRVVSVLTVLHQDWLNGKEYKCKVSNKALPAPIEKTISKAKGQPREPQVYTLPPSRDELTKNQVSLTCLVKGFYPSDIAVEWESNGQPENNYKTTPPVLDSDGSFFLYSKLTVDKSRWQQGNVFSCSVMHEALHNHYTQKSLSLSPGK

SEQ ID NO: 69 - protein, 321 aa, Artificial Sequence
  Synthetic
MARAWIFFLLCLAGRALADKEWILQKIYEIMRLLDELGHAEASMRVSDLIYEFMKKGDERLLEEAERLLEEVERGGSGSGGSGSGSGGSEPKSSDKTHTCPPCPAPELLGGPSVFLFPPKPKDTLMISRTPEVTCVVVDVSHEDPEVKFNWYVDGVEVHNAKTKPREEQYNSTYRVVSVLTVLHQDWLNGKEYKCKVSNKALPAPIEKTISKAKGQPREPQVYTLPPSRDELTKNQVSLTCLVKGFYPSDIAVEWESNGQPENNYKTTPPVLDSDGSFFLYSKLTVDKSRWQQGNVFSCSVMHEALHNHYTQKSLSLSPGK

SEQ ID NO: 70 - protein, 321 aa, Artificial Sequence
  Synthetic
MARAWIFFLLCLAGRALAEPKSSDKTHTCPPCPAPELLGGPSVFLFPPKPKDTLMISRTPEVTCVVVDVSHEDPEVKFNWYVDGVEVHNAKTKPREEQYNSTYRVVSVLTVLHQDWLNGKEYKCKVSNKALPAPIEKTISKAKGQPREPQVYTLPPSRDELTKNQVSLTCLVKGFYPSDIAVEWESNGQPENNYKTTPPVLDSDGSFFLYSKLTVDKSRWQQGNVFSCSVMHEALHNHYTQKSLSLSPGKSGGSGSGSGGSGSGSDKEWILQKIYEIMRLLDELGHAEASMRVSDLIYEFMKKGDERLLEEAERLLEEVER

SEQ ID NO: 71 - protein, 392 aa, Artificial Sequence
  Synthetic
MARAWIFFLLCLAGRALADKEWILQKIYEIMRLLDELGHAEASMRVSDLIYEFMKKGDERLLEEAERLLEEVERGGSGSGGSGSGSGGSEPKSSDKTHTCPPCPAPELLGGPSVFLFPPKPKDTLMISRTPEVTCVVVDVSHEDPEVKFNWYVDGVEVHNAKTKPREEQYNSTYRVVSVLTVLHQDWLNGKEYKCKVSNKALPAPIEKTISKAKGQPREPQVYTLPPSRDELTKNQVSLTCLVKGFYPSDIAVEWESNGQPENNYKTTPPVLDSDGSFFLYSKLTVDKSRWQQGNVFSCSVMHEALHNHYTQKSLSLSPGKSGGSGSGSGGSGSGSDKEWILQKIYEIMRLLDELGHAEASMRVSDLIYEFMKKGDERLLEEAERLLEEVER

SEQ ID NO: 72 - protein, 310 aa, Artificial Sequence
  Synthetic
MARAWIFFLLCLAGRALADKEWILQKIYEIMRLLDELGHAEASMRVSDLIYEFMKQGDERLLEEAERLLEEVERGSGSEPKSSDKTHTCPPCPAPELLGGPSVFLFPPKPKDTLMISRTPEVTCVVVDVSHEDPEVKFNWYVDGVEVHNAKTKPREEQYNSTYRVVSVLTVLHQDWLNGKEYKCKVSNKALPAPIEKTISKAKGQPREPQVYTLPPSRDELTKNQVSLTCLVKGFYPSDIAVEWESNGQPENNYKTTPPVLDSDGSFFLYSKLTVDKSRWQQGNVFSCSVMHEALHNHYTQKSLSLSPGK

SEQ ID NO: 73 - protein, 321 aa, Artificial Sequence
  Synthetic
MARAWIFFLLCLAGRALADKEWILQKIYEIMRLLDELGHAEASMRVSDLIYEFMKQGDERLLEEAERLLEEVERGGSGSGGSGSGSGGSEPKSSDKTHTCPPCPAPELLGGPSVFLFPPKPKDTLMISRTPEVTCVVVDVSHEDPEVKFNWYVDGVEVHNAKTKPREEQYNSTYRVVSVLTVLHQDWLNGKEYKCKVSNKALPAPIEKTISKAKGQPREPQVYTLPPSRDELTKNQVSLTCLVKGFYPSDIAVEWESNGQPENNYKTTPPVLDSDGSFFLYSKLTVDKSRWQQGNVFSCSVMHEALHNHYTQKSLSLSPGK

SEQ ID NO: 74 - protein, 321 aa, Artificial Sequence
  Synthetic
MARAWIFFLLCLAGRALAEPKSSDKTHTCPPCPAPELLGGPSVFLFPPKPKDTLMISRTPEVTCVVVDVSHEDPEVKFNWYVDGVEVHNAKTKPREEQYNSTYRVVSVLTVLHQDWLNGKEYKCKVSNKALPAPIEKTISKAKGQPREPQVYTLPPSRDELTKNQVSLTCLVKGFYPSDIAVEWESNGQPENNYKTTPPVLDSDGSFFLYSKLTVDKSRWQQGNVFSCSVMHEALHNHYTQKSLSLSPGKSGGSGSGSGGSGSGSDKEWILQKIYEIMRLLDELGHAEASMRVSDLIYEFMKQGDERLLEEAERLLEEVER

SEQ ID NO: 75 - protein, 392 aa, Artificial Sequence
  Synthetic
MARAWIFFLLCLAGRALADKEWILQKIYEIMRLLDELGHAEASMRVSDLIYEFMKQGDERLLEEAERLLEEVERGGSGSGGSGSGSGGSEPKSSDKTHTCPPCPAPELLGGPSVFLFPPKPKDTLMISRTPEVTCVVVDVSHEDPEVKFNWYVDGVEVHNAKTKPREEQYNSTYRVVSVLTVLHQDWLNGKEYKCKVSNKALPAPIEKTISKAKGQPREPQVYTLPPSRDELTKNQVSLTCLVKGFYPSDIAVEWESNGQPENNYKTTPPVLDSDGSFFLYSKLTVDKSRWQQGNVFSCSVMHEALHNHYTQKSLSLSPGKSGGSGSGSGGSGSGSDKEWILQKIYEIMRLLDELGHAEASMRVSDLIYEFMKQGDERLLEEAERLLEEVER

SEQ ID NO: 76 - protein, 321 aa, Artificial Sequence
  Synthetic
MARAWIFFLLCLAGRALADKENILQKIYEIMKTLDQLGHAEASMQVSDLIYEFMKQGDERLLEEAERLLEEVERGGSGSGGSGSGSGGSEPKSSDKTHTCPPCPAPELLGGPSVFLFPPKPKDTLMISRTPEVTCVVVDVSHEDPEVKFNWYVDGVEVHNAKTKPREEQYNSTYRVVSVLTVLHQDWLNGKEYKCKVSNKALPAPIEKTISKAKGQPREPQVYTLPPSRDELTKNQVSLTCLVKGFYPSDIAVEWESNGQPENNYKTTPPVLDSDGSFFLYSKLTVDKSRWQQGNVFSCSVMHEALHNHYTQKSLSLSPGK

SEQ ID NO: 77 - protein, 321 aa, Artificial Sequence
  Synthetic
MARAWIFFLLCLAGRALADKENILQKIYEIMKTLDQLGHAEASMNVSDLIYEFMKQGDERLLEEAERLLEEVERGGSGSGGSGSGSGGSEPKSSDKTHTCPPCPAPELLGGPSVFLFPPKPKDTLMISRTPEVTCVVVDVSHEDPEVKFNWYVDGVEVHNAKTKPREEQYNSTYRVVSVLTVLHQDWLNGKEYKCKVSNKALPAPIEKTISKAKGQPREPQVYTLPPSRDELTKNQVSLTCLVKGFYPSDIAVEWESNGQPENNYKTTPPVLDSDGSFFLYSKLTVDKSRWQQGNVFSCSVMHEALHNHYTQKSLSLSPGK

SEQ ID NO: 78 - protein, 329 aa, Artificial Sequence
  Synthetic
MARAWIFFLLCLAGRALANDDELHMQMTDLVYEALHFAKDEEIQKHVFQLFEKATKAYKNKDRQKLEKVVEELKELLERLLSGGSGSGGSGSGSGGSEPKSSDKTHTCPPCPAPELLGGPSVFLFPPKPKDTLMISRTPEVTCVVVDVSHEDPEVKFNWYVDGVEVHNAKTKPREEQYNSTYRVVSVLTVLHQDWLNGKEYKCKVSNKALPAPIEKTISKAKGQPREPQVYTLPPSRDELTKNQVSLTCLVKGFYPSDIAVEWESNGQPENNYKTTPPVLDSDGSFFLYSKLTVDKSRWQQGNVFSCSVMHEALHNHYTQKSLSLSPGK

SEQ ID NO: 79 - protein, 329 aa, Artificial Sequence
  Synthetic
MARAWIFFLLCLAGRALANDDELHMQMTDLVYEALHFAKDEEIQKHVFQLFENATKAYKNKDRQKLEKVVEELKELLERLLSGGSGSGGSGSGSGGSEPKSSDKTHTCPPCPAPELLGGPSVFLFPPKPKDTLMISRTPEVTCVVVDVSHEDPEVKFNWYVDGVEVHNAKTKPREEQYNSTYRVVSVLTVLHQDWLNGKEYKCKVSNKALPAPIEKTISKAKGQPREPQVYTLPPSRDELTKNQVSLTCLVKGFYPSDIAVEWESNGQPENNYKTTPPVLDSDGSFFLYSKLTVDKSRWQQGNVFSCSVMHEALHNHYTQKSLSLSPGK

SEQ ID NO: 80 - protein, 372 aa, Artificial Sequence
  Synthetic
MARAWIFFLLCLAGRALADKENILQKIYEIMKTLDQLGHAEASMQVSDLIYEFMKQGDERLLEEAERLLEEVERAGSGGSGGSGGSPVPSTPPTPSPSTPPTPSPSGGSGNSSGSGGSPVPSTPPTPSPSTPPTPSPSASEPKSSDKTHTCPPCPAPELLGGPSVFLFPPKPKDTLMISRTPEVTCVVVDVSHEDPEVKFNWYVDGVEVHNAKTKPREEQYNSTYRVVSVLTVLHQDWLNGKEYKCKVSNKALPAPIEKTISKAKGQPREPQVYTLPPSRDELTKNQVSLTCLVKGFYPSDIAVEWESNGQPENNYKTTPPVLDSDGSFFLYSKLTVDKSRWQQGNVFSCSVMHEALHNHYTQKSLSLSPGK

SEQ ID NO: 81 - protein, 380 aa, Artificial Sequence
  Synthetic
MARAWIFFLLCLAGRALANDDELHMQMTDLVYEALHFAKDEEIQKHVFQLFEKATKAYKNKDRQKLEKVVEELKELLERLLSAGSGGSGGSGGSPVPSTPPTPSPSTPPTPSPSGGSGNSSGSGGSPVPSTPPTPSPSTPPTPSPSASEPKSSDKTHTCPPCPAPELLGGPSVFLFPPKPKDTLMISRTPEVTCVVVDVSHEDPEVKFNWYVDGVEVHNAKTKPREEQYNSTYRVVSVLTVLHQDWLNGKEYKCKVSNKALPAPIEKTISKAKGQPREPQVYTLPPSRDELTKNQVSLTCLVKGFYPSDIAVEWESNGQPENNYKTTPPVLDSDGSFFLYSKLTVDKSRWQQGNVFSCSVMHEALHNHYTQKSLSLSPGK

SEQ ID NO: 82 - protein, 336 aa, Artificial Sequence
  Synthetic
MARAWIFFLLCLAGRALADKENILQKIYEIMKTLDQLGHAEASMQVSDLIYEFMKQGDERLLEEAERLLEEVERGGGSGGGGSGGGGSGGGGSGGGGSGGGGSGEPKSSDKTHTCPPCPAPELLGGPSVFLFPPKPKDTLMISRTPEVTCVVVDVSHEDPEVKFNWYVDGVEVHNAKTKPREEQYNSTYRVVSVLTVLHQDWLNGKEYKCKVSNKALPAPIEKTISKAKGQPREPQVYTLPPSRDELTKNQVSLTCLVKGFYPSDIAVEWESNGQPENNYKTTPPVLDSDGSFFLYSKLTVDKSRWQQGNVFSCSVMHEALHNHYTQKSLSLSPGK

SEQ ID NO: 83 - protein, 344 aa, Artificial Sequence
  Synthetic
MARAWIFFLLCLAGRALANDDELHMQMTDLVYEALHFAKDEEIQKHVFQLFEKATKAYKNKDRQKLEKVVEELKELLERLLSGGGSGGGGSGGGGSGGGGSGGGGSGGGGSGEPKSSDKTHTCPPCPAPELLGGPSVFLFPPKPKDTLMISRTPEVTCVVVDVSHEDPEVKFNWYVDGVEVHNAKTKPREEQYNSTYRVVSVLTVLHQDWLNGKEYKCKVSNKALPAPIEKTISKAKGQPREPQVYTLPPSRDELTKNQVSLTCLVKGFYPSDIAVEWESNGQPENNYKTTPPVLDSDGSFFLYSKLTVDKSRWQQGNVFSCSVMHEALHNHYTQKSLSLSPGK

SEQ ID NO: 84 - protein, 321 aa, Artificial Sequence
  Synthetic
MARAWIFFLLCLAGRALADKENILQKIYEIMKTLEQLGHAEASMQVSDLIYEFMKQGDERLLEEAERLLEEVERGGSGSGGSGSGSGGSEPKSSDKTHTCPPCPAPELLGGPSVFLFPPKPKDTLMISRTPEVTCVVVDVSHEDPEVKFNWYVDGVEVHNAKTKPREEQYNSTYRVVSVLTVLHQDWLNGKEYKCKVSNKALPAPIEKTISKAKGQPREPQVYTLPPSRDELTKNQVSLTCLVKGFYPSDIAVEWESNGQPENNYKTTPPVLDSDGSFFLYSKLTVDKSRWQQGNVFSCSVMHEALHNHYTQKSLSLSPGK

SEQ ID NO: 85 - protein, 321 aa, Artificial Sequence
  Synthetic
MARAWIFFLLCLAGRALADKENILQKIYEIMKTLEQLGHAEASMNVSDLIYEFMKQGDERLLEEAERLLEEVERGGSGSGGSGSGSGGSEPKSSDKTHTCPPCPAPELLGGPSVFLFPPKPKDTLMISRTPEVTCVVVDVSHEDPEVKFNWYVDGVEVHNAKTKPREEQYNSTYRVVSVLTVLHQDWLNGKEYKCKVSNKALPAPIEKTISKAKGQPREPQVYTLPPSRDELTKNQVSLTCLVKGFYPSDIAVEWESNGQPENNYKTTPPVLDSDGSFFLYSKLTVDKSRWQQGNVFSCSVMHEALHNHYTQKSLSLSPGK

SEQ ID NO: 86 - protein, 372 aa, Artificial Sequence
  Synthetic
MARAWIFFLLCLAGRALADKENILQKIYEIMKTLEQLGHAEASMQVSDLIYEFMKQGDERLLEEAERLLEEVERAGSGGSGGSGGSPVPSTPPTPSPSTPPTPSPSGGSGNSSGSGGSPVPSTPPTPSPSTPPTPSPSASEPKSSDKTHTCPPCPAPELLGGPSVFLFPPKPKDTLMISRTPEVTCVVVDVSHEDPEVKFNWYVDGVEVHNAKTKPREEQYNSTYRVVSVLTVLHQDWLNGKEYKCKVSNKALPAPIEKTISKAKGQPREPQVYTLPPSRDELTKNQVSLTCLVKGFYPSDIAVEWESNGQPENNYKTTPPVLDSDGSFFLYSKLTVDKSRWQQGNVFSCSVMHEALHNHYTQKSLSLSPGK

SEQ ID NO: 87 - protein, 336 aa, Artificial Sequence
  Synthetic
MARAWIFFLLCLAGRALADKENILQKIYEIMKTLEQLGHAEASMQVSDLIYEFMKQGDERLLEEAERLLEEVERGGGSGGGGSGGGGSGGGGSGGGGSGGGGSGEPKSSDKTHTCPPCPAPELLGGPSVFLFPPKPKDTLMISRTPEVTCVVVDVSHEDPEVKFNWYVDGVEVHNAKTKPREEQYNSTYRVVSVLTVLHQDWLNGKEYKCKVSNKALPAPIEKTISKAKGQPREPQVYTLPPSRDELTKNQVSLTCLVKGFYPSDIAVEWESNGQPENNYKTTPPVLDSDGSFFLYSKLTVDKSRWQQGNVFSCSVMHEALHNHYTQKSLSLSPGK

SEQ ID NO: 88 - protein, 321 aa, Artificial Sequence
  Synthetic
MARAWIFFLLCLAGRALADKENVLQKIYEIMKELERLGHAEASMQVSDLIYEFMKTKDENLLEEAERLLEEVKRGGSGSGGSGSGSGGSEPKSSDKTHTCPPCPAPELLGGPSVFLFPPKPKDTLMISRTPEVTCVVVDVSHEDPEVKFNWYVDGVEVHNAKTKPREEQYNSTYRVVSVLTVLHQDWLNGKEYKCKVSNKALPAPIEKTISKAKGQPREPQVYTLPPSRDELTKNQVSLTCLVKGFYPSDIAVEWESNGQPENNYKTTPPVLDSDGSFFLYSKLTVDKSRWQQGNVFSCSVMHEALHNHYTQKSLSLSPGK

SEQ ID NO: 89 - protein, 321 aa, Artificial Sequence
  Synthetic
MARAWIFFLLCLAGRALADKENVLQKIYEIMKELERLGHAEASMQVSDLIYEFMKTKDENLLEEAERLLEEVKRGGSGSGGSGSGSGGSEPKSSDKTHTCPRCPAPELLGGPSVFLFPPKPKDTLMISRTPEVTCVVVDVSHEDPEVQFKWYVDGVEVHNAKTKPREEQFNSTFRVVSVLTVLHQDWLNGKEYKCKVSNKALPAPIEKTISKTKGQPREPQVYTLPPSREEMTKNQVSLTCLVKGFYPSDIAVEWESSGQPENNYNTTPPMLDSDGSFFLYSKLTVDKSRWQQGNIFSCSVMHEALHNRFTQKSLSLSPGK

SEQ ID NO: 90 - protein, 395 aa, Artificial Sequence
  Synthetic
MARAWIFFLLCLAGRALANIDELLMQVTDLIYEALHFAKDEEFQKHAFQLFEKATKAYKNKDKQKLEKVVEELKELLERILSGGGSGGGSGGDKENVLQKIYEIMKELERLGHAEASMQVSDLIYEFMKTKDENLLEEAERLLEEVKRGGSGSGGSGSGSGGSEPKSSDKTHTCPPCPAPELLGGPSVFLFPPKPKDTLMISRTPEVTCVVVDVSHEDPEVKFNWYVDGVEVHNAKTKPREEQYNSTYRVVSVLTVLHQDWLNGKEYKCKVSNKALPAPIEKTISKAKGQPREPQVYTLPPSRDELTKNQVSLTCLVKGFYPSDIAVEWESNGQPENNYKTTPPVLDSDGSFFLYSKLTVDKSRWQQGNVFSCSVMHEALHNHYTQKSLSLSPGK

SEQ ID NO: 91 - protein, 480 aa, Artificial Sequence
  Synthetic
MARAWIFFLLCLAGRALAELEEQVMHVLDQVSELAHELLHKLTGEELERAAYFNWWATEMMLELIKSDDEREIREIEEEARRILEHLEELARKGGGSGGGSGGNIDELLMQVTDLIYEALHFAKDEEFQKHAFQLFEKATKAYKNKDKQKLEKVVEELKELLERILSGGGSGGGSGGDKENVLQKIYEIMKELERLGHAEASMQVSDLIYEFMKTKDENLLEEAERLLEEVKRGGSGSGGSGSGSGGSEPKSSDKTHTCPPCPAPELLGGPSVFLFPPKPKDTLMISRTPEVTCVVVDVSHEDPEVKFNWYVDGVEVHNAKTKPREEQYNSTYRVVSVLTVLHQDWLNGKEYKCKVSNKALPAPIEKTISKAKGQPREPQVYTLPPSRDELTKNQVSLTCLVKGFYPSDIAVEWESNGQPENNYKTTPPVLDSDGSFFLYSKLTVDKSRWQQGNVFSCSVMHEALHNHYTQKSLSLSPGK

SEQ ID NO: 92 - protein, 480 aa, Artificial Sequence
  Synthetic
MARAWIFFLLCLAGRALANIDELLMQVTDLIYEALHFAKDEEFQKHAFQLFEKATKAYKNKDKQKLEKVVEELKELLERILSGGGSGGGSGGELEEQVMHVLDQVSELAHELLHKLTGEELERAAYFNWWATEMMLELIKSDDEREIREIEEEARRILEHLEELARKGGGSGGGSGGDKENVLQKIYEIMKELERLGHAEASMQVSDLIYEFMKTKDENLLEEAERLLEEVKRGGSGSGGSGSGSGGSEPKSSDKTHTCPPCPAPELLGGPSVFLFPPKPKDTLMISRTPEVTCVVVDVSHEDPEVKFNWYVDGVEVHNAKTKPREEQYNSTYRVVSVLTVLHQDWLNGKEYKCKVSNKALPAPIEKTISKAKGQPREPQVYTLPPSRDELTKNQVSLTCLVKGFYPSDIAVEWESNGQPENNYKTTPPVLDSDGSFFLYSKLTVDKSRWQQGNVFSCSVMHEALHNHYTQKSLSLSPGK

SEQ ID NO: 93 - protein, 395 aa, Artificial Sequence
  Synthetic
MARAWIFFLLCLAGRALANIDELLMQVTDLIYEALHFAKDEEFQKHAFQLFEKATKAYKNKDKQKLEKVVEELKELLERILSGGGSGGGSGGDKENVLQKIYEIMKELERLGHAEASMQVSDLIYEFMKTKDENLLEEAERLLEEVKRGGSGSGGSGSGSGGSEPKSSDKTHTCPPCPAPELLAGPSVFLFPPKPKDTLMISRTPEVTCVVVDVSHEDPEVKFNWYVDGVEVHNAKTKPREEQYNSTYRVVSVLTVLHQDWLNGKEYKCKVSNKALPAPIEKTISKAKGQPREPQVYTLPPSRDELTKNQVSLTCLVKGFYPSDIAVEWESNGQPENNYKTTPPVLDSDGSFFLYSKLTVDKSRWQQGNVFSCSVMHEALHNHYTQKSLSLSPGK

SEQ ID NO: 94 - protein, 395 aa, Artificial Sequence
  Synthetic
MARAWIFFLLCLAGRALANIDELLMQVTDLIYEALHFAKDEEFQKHAFQLFEKATKAYKNKDKQKLEKVVEELKELLERILSGGGSGGGSGGDKENVLQKIYEIMKELERLGHAEASMQVSDLIYEFMKTKDENLLEEAERLLEEVKRGGSGSGGSGSGSGGSEPKSSDKTHTCPPCPAPELLRGPSVFLFPPKPKDTLMISRTPEVTCVVVDVSHEDPEVKFNWYVDGVEVHNAKTKPREEQYNSTYRVVSVLTVLHQDWLNGKEYKCKVSNKARPAPIEKTISKAKGQPREPQVYTLPPSRDELTKNQVSLTCLVKGFYPSDIAVEWESNGQPENNYKTTPPVLDSDGSFFLYSKLTVDKSRWQQGNVFSCSVMHEALHNHYTQKSLSLSPGK

SEQ ID NO: 95 - protein, 395 aa, Artificial Sequence
  Synthetic
MARAWIFFLLCLAGRALANIDELLMQVTDLIYEALHFAKDEEFQKHAFQLFEKATKAYKNKDKQKLEKVVEELKELLERILSGGGSGGGSGGDKENVLQKIYEIMKELERLGHAEASMQVSDLIYEFMKTKDENLLEEAERLLEEVKRGGSGSGGSGSGSGGSEPKSSDKTHTCPPCPAPELLAGPSVFLFPPKPKDTLMISRTPEVTCVVVDVSHEDPEVKFNWYVDGVEVHNAKTKPREEQYNSTYRVVSVLTVLHQDWLNGKEYKCKVSNKALPLPEEKTISKAKGQPREPQVYTLPPSRDELTKNQVSLTCLVKGFYPSDIAVEWESNGQPENNYKTTPPVLDSDGSFFLYSKLTVDKSRWQQGNVFSCSVMHEALHNHYTQKSLSLSPGK

SEQ ID NO: 96 - protein, 395 aa, Artificial Sequence
  Synthetic
MARAWIFFLLCLAGRALANIDELLMQVTDLIYEALHFAKDEEFQKHAFQLFEKATKAYKNKDKQKLEKVVEELKELLERILSGGGSGGGSGGDKENVLQKIYEIMKELERLGHAEASMQVSDLIYEFMKTKDENLLEEAERLLEEVKRGGSGSGGSGSGSGGSEPKSSDKTHTCPPCPAPELLAGPSVFLFPPKPKDTLMISRTPEVTCVVVDVSHEDPEVKFNWYVDGVEVHNAKTKPREEQYNSTYRVVSVLTVLHQDWLNGKEYKCKVSNKALPLPEEKTISKAKGQPREPQVYTLPPSRDELTKNQVSLTCLVKGFYPSDIAVEWESNGQPENNYKTTPPVLDSDGSFFLYSKLTVDKSRWQQGNVFSCSVLHEALHSHYTQKSLSLSPGK

SEQ ID NO: 97 - protein, 75 aa, Artificial Sequence
  Synthetic
AGSGGSGGSGGSPVPSTPPTPSPSTPPTPSPSPVPSTPPTPSPSTPPTPSPSPVPSTPPTPSPSTPPTPSPSASG

SEQ ID NO: 98 - protein, 65 aa, Artificial Sequence
  Synthetic
GSGGSGGSGGSPVPSTPPTPSPSTPPTPSPSGGSGNSSGSGGSPVPSTPPTPSPSTPPTPSPSAS

SEQ ID NO: 99 - protein, 85 aa, Artificial Sequence
  Synthetic
GGSSGQIFVKTLTGKTITLEVEPSDTIENVKAKIQDKEGIPPDQQRLIFAGKQLEDGRTLSDYNIQKESTLHLVLRLRGGGGSSG

SEQ ID NO: 100 - protein, 75 aa, Artificial Sequence
  Synthetic
ELEERVMHLLDQVSELAHELLHKLTGEELQRATHFDKWANEAILELIKSDDEREIREIEEEARRILEHLEELARK

SEQ ID NO: 101 - protein, 75 aa, Artificial Sequence
  Synthetic
ELEEQVMHVLDQVSELAHELLHKLTGEELERAAYFNWWATEMMLELIKSDDEREIREIEEEARRILEHLEELARK

SEQ ID NO: 102 - protein, 56 aa, Artificial Sequence
  Synthetic
DKENILQKIYEIMRLLDELGHAEASMRVSDLIYEFMKKGDERLLEEAERLLEEVER

SEQ ID NO: 103 - protein, 56 aa, Artificial Sequence
  Synthetic
DKEKILQKIYEIMRLLDELGHAEASMRVSDLIYEFMKKGDERLLEEAERLLEEVER

SEQ ID NO: 104 - protein, 56 aa, Artificial Sequence
  Synthetic
DKEWILQKIYEIMKLLDELGHAEASMRVSDLIYEFMKKGDERLLEEAERLLEEVER

SEQ ID NO: 105 - protein, 56 aa, Artificial Sequence
  Synthetic
DKEWILQKIYEIMRTLDELGHAEASMRVSDLIYEFMKKGDERLLEEAERLLEEVER

SEQ ID NO: 106 - protein, 56 aa, Artificial Sequence
  Synthetic
DKEWILQKIYEIMRLLDQLGHAEASMRVSDLIYEFMKKGDERLLEEAERLLEEVER

SEQ ID NO: 107 - protein, 56 aa, Artificial Sequence
  Synthetic
DKEWILQKIYEIMRLLDKLGHAEASMRVSDLIYEFMKKGDERLLEEAERLLEEVER

SEQ ID NO: 108 - protein, 56 aa, Artificial Sequence
  Synthetic
DKEWILQKIYEIMRLLDELGHAEASMQVSDLIYEFMKKGDERLLEEAERLLEEVER

SEQ ID NO: 109 - protein, 56 aa, Artificial Sequence
  Synthetic
DKEWILQKIYEIMRLLDELGHAEASMYVSDLIYEFMKKGDERLLEEAERLLEEVER

SEQ ID NO: 110 - protein, 56 aa, Artificial Sequence
  Synthetic
DKEWILQKIYEIMRLLEELGHAEASMRVSDLIYEFMKKGDERLLEEAERLLEEVER

SEQ ID NO: 111 - protein, 56 aa, Artificial Sequence
  Synthetic
DKEWILQKIYEIMRLLRELGHAEASMRVSDLIYEFMKKGDERLLEEAERLLEEVER

SEQ ID NO: 112 - protein, 56 aa, Artificial Sequence
  Synthetic
DKEWILQKIYEIMRLLDELGHAEASMRVSDLIYEFMKKGDENLLEEAERLLEEVER

SEQ ID NO: 113 - protein, 56 aa, Artificial Sequence
  Synthetic
DKEWILQKIYEIMRLLDELGHAEASMRVSDLIYEFMKKGDERLLEEAEQLLEEVER

SEQ ID NO: 114 - protein, 56 aa, Artificial Sequence
  Synthetic
DKEWILQKIYEIMRLLDELGHAEASMRVSDLIYEFMKKGDERLLEEAERLLQEVER

SEQ ID NO: 115 - protein, 56 aa, Artificial Sequence
  Synthetic
DKEWILQKIYEIMRLLDELGHAEASMRVSDLLYEFMKKGDERLLEEAERLLEEVER

SEQ ID NO: 116 - protein, 56 aa, Artificial Sequence
  Synthetic
DKEWILQKIYEIMRLLDELGHAEASMRASDLIYEFMKKGDERLLEEAERLLEEVER

SEQ ID NO: 117 - protein, 56 aa, Artificial Sequence
  Synthetic
DKENILQKIYEIMKTLEQLGHAEASMYVSDLIYEFMKQGDERLLEEAERLLEEVER

SEQ ID NO: 118 - protein, 56 aa, Artificial Sequence
  Synthetic
DKENILQKIYEIMKTLEQLGHAEASMQVSDLIYEFMKQGDENLLEEAERLLEEVER

SEQ ID NO: 119 - protein, 56 aa, Artificial Sequence
  Synthetic
DKENILQKIYEIMKTLEQLGHAEASMQVSDLIYEFMKQGDERLLEEAEQLLEEVER

SEQ ID NO: 120 - protein, 56 aa, Artificial Sequence
  Synthetic
DKENILQKIYEIMKTLEQLGHAEASMYVSDLIYEFMKQGDENLLEEAEQLLEEVER

SEQ ID NO: 121 - protein, 56 aa, Artificial Sequence
  Synthetic
DKENILQKIYEIMKTLEQLGHAEASMQVSDLIYEFMKQGDENLLEEAEQLLEEVER

SEQ ID NO: 122 - protein, 56 aa, Artificial Sequence
  Synthetic
DRENILQKIYEIMKELEKLGHAEASMQVSDLIYEFMQDKDERLLEEAERLLEEVKR

SEQ ID NO: 123 - protein, 56 aa, Artificial Sequence
  Synthetic
DRENILQKIYEIMKELRQLGHAEASMQVSDLIYEFMKTKDKRLLEEAERLLEEVKR

SEQ ID NO: 124 - protein, 56 aa, Artificial Sequence
  Synthetic
DRENILQKIYEIMKTLRRLGHAEASMQVSDLIYEFMQDKDKRLLEEAERLLEEVQR

SEQ ID NO: 125 - protein, 56 aa, Artificial Sequence
  Synthetic
DKENVLQKIYEIMKELERLGHAEASMQVSDLIYEFMKTKDERLLEEAERLLEEVKR

SEQ ID NO: 126 - protein, 56 aa, Artificial Sequence
  Synthetic
DRENILQKIYEIMKTLEKLGHAEASMQASDLIYEFMKTKDERLLEEAERLLEEVQR

SEQ ID NO: 127 - protein, 56 aa, Artificial Sequence
  Synthetic
DKENILQKIYEIMKTLRALGHAEASMQVSDLIYEFMQTKDERLLEEAERLLEEVKR

SEQ ID NO: 128 - protein, 56 aa, Artificial Sequence
  Synthetic
DKENVLQKIYEIMKTLEKLGHAEASMQVSDLIYEFMQTKDKRLLEEAERLLEEVQR

SEQ ID NO: 129 - protein, 56 aa, Artificial Sequence
  Synthetic
DRENILQKIYEIMKELEKLGHAEASMQVSDLIYEFMQDKDENLLEEAERLLEEVKR

SEQ ID NO: 130 - protein, 56 aa, Artificial Sequence
  Synthetic
DRENILQKIYEIMKELRQLGHAEASMQVSDLIYEFMKTKDKNLLEEAERLLEEVKR

SEQ ID NO: 131 - protein, 56 aa, Artificial Sequence
  Synthetic
DRENILQKIYEIMKTLRRLGHAEASMQVSDLIYEFMQDKDKNLLEEAERLLEEVQR

SEQ ID NO: 132 - protein, 56 aa, Artificial Sequence
  Synthetic
DRENILQKIYEIMKTLEKLGHAEASMQASDLIYEFMKTKDENLLEEAERLLEEVQR

SEQ ID NO: 133 - protein, 56 aa, Artificial Sequence
  Synthetic
DKENILQKIYEIMKTLRALGHAEASMQVSDLIYEFMQTKDENLLEEAERLLEEVKR

SEQ ID NO: 134 - protein, 56 aa, Artificial Sequence
  Synthetic
DKENVLQKIYEIMKTLEKLGHAEASMQVSDLIYEFMQTKDKNLLEEAERLLEEVQR

SEQ ID NO: 135 - protein, 56 aa, Artificial Sequence
  Synthetic
DKENVLQKIYEIMKELERLGHAEASMQVSDLIYEFMKTKDENLLEEAERLLEEVKR

SEQ ID NO: 136 - protein, 56 aa, Artificial Sequence
  Synthetic
DKENVLQKIYEIMKELERLGHAEASMQVSDLIYEFMKTKDENLLEEAERLLEEVTR

SEQ ID NO: 137 - protein, 64 aa, Artificial Sequence
  Synthetic
NDDELHMQMTDLVYEALHFAKDEEIKKRVFQLFELADKAYKNNDRQKLEKVVEELKELLERLLS

SEQ ID NO: 138 - protein, 64 aa, Artificial Sequence
  Synthetic
NDDELHMTMTDLVYEALHFAKDEEIKKRVFQLFELADKAYKNNDRQKLEKVVEELKELLERLLS

SEQ ID NO: 139 - protein, 64 aa, Artificial Sequence
  Synthetic
NDDELHMLMTDLVYEALHKAKDEEIKKRVFQLFELADKAYKNNDRQKLEKVVEELKELLERLLS

SEQ ID NO: 140 - protein, 64 aa, Artificial Sequence
  Synthetic
NDDELHMLMTDLVYEALHIAKDEEIKKRVFQLFELADKAYKNNDRQKLEKVVEELKELLERLLS

SEQ ID NO: 141 - protein, 64 aa, Artificial Sequence
  Synthetic
NDDELHMLMTDLVYEALHFAKDEEFKKRVFQLFELADKAYKNNDRQKLEKVVEELKELLERLLS

SEQ ID NO: 142 - protein, 64 aa, Artificial Sequence
  Synthetic
NDDELHMLMTDLVYEALHFAKDEEMKKRVFQLFELADKAYKNNDRQKLEKVVEELKELLERLLS

SEQ ID NO: 143 - protein, 64 aa, Artificial Sequence
  Synthetic
NDDELHMLMTDLVYEALHFAKDEEIQKRVFQLFELADKAYKNNDRQKLEKVVEELKELLERLLS

SEQ ID NO: 144 - protein, 64 aa, Artificial Sequence
  Synthetic
NDDELHMLMTDLVYEALHFAKDEEIKKHVFQLFELADKAYKNNDRQKLEKVVEELKELLERLLS

SEQ ID NO: 145 - protein, 64 aa, Artificial Sequence
  Synthetic
NDDELHMLMTDLVYEALHFAKDEEIKKRVFQLFEKADKAYKNNDRQKLEKVVEELKELLERLLS

SEQ ID NO: 146 - protein, 64 aa, Artificial Sequence
  Synthetic
NDDELHMLMTDLVYEALHFAKDEEIKKRVFQLFELATKAYKNNDRQKLEKVVEELKELLERLLS

SEQ ID NO: 147 - protein, 64 aa, Artificial Sequence
  Synthetic
NDDELHMLMTDLVYEALHFAKDEEIKKRVFQLFELADKARKNNDRQKLEKVVEELKELLERLLS

SEQ ID NO: 148 - protein, 64 aa, Artificial Sequence
  Synthetic
NDDELHMLMTDLVYEALHFAKDEEIKKRVFQLFELADKAYKNKDRQKLEKVVEELKELLERLLS

SEQ ID NO: 149 - protein, 64 aa, Artificial Sequence
  Synthetic
NDDELHMLMTDLVYEALHFAKDEEIKKRVFQLFGLADKAYKNNDRQKLEKVVEELKELLERLLS

SEQ ID NO: 150 - protein, 64 aa, Artificial Sequence
  Synthetic
NDDELHMLMTDLVYEALHFAKDEEIKKRVFQLFYLADKAYKNNDRQKLEKVVEELKELLERLLS

SEQ ID NO: 151 - protein, 64 aa, Artificial Sequence
  Synthetic
NDDELHMLMTDLVYEALHFAKDEEIKKRVFQLFTLADKAYKNNDRQKLEKVVEELKELLERLLS

SEQ ID NO: 152 - protein, 64 aa, Artificial Sequence
  Synthetic
NDDELHMLMTDLVYEALHFAKDEEIKKRVFQLFELADKAYKNNDRQKLKKVVEELKELLERLLS

SEQ ID NO: 153 - protein, 64 aa, Artificial Sequence
  Synthetic
NDDELHMQMTDLVYEALHFAKDEEIQKHVFQLFGKATKAYKNKDRQKLEKVVEELKELLERLLS

SEQ ID NO: 154 - protein, 64 aa, Artificial Sequence
  Synthetic
NDDELHMQMTDLVYEALHFAKDEEIQKHVFQLFYKATKAYKNKDRQKLEKVVEELKELLERLLS

SEQ ID NO: 155 - protein, 64 aa, Artificial Sequence
  Synthetic
NLDELHMQMTDLVYEALHFAKDEEFQKHVFQLFEKATKAYKNKDRQKLEKVVEELKELLERLLS

SEQ ID NO: 156 - protein, 64 aa, Artificial Sequence
  Synthetic
NDDELHMQMTDLVYEALHFAKTEEFQKHVFQLFEKATKAYKNKDRQKLEKVVEELKELLERLLS

SEQ ID NO: 157 - protein, 64 aa, Artificial Sequence
  Synthetic
NDDELHMQMTDLVYEALHFAKDEEFQKHVFQLFEKARKAYKNKDRQKLEKVVEELKELLERLLS

SEQ ID NO: 158 - protein, 64 aa, Artificial Sequence
  Synthetic
NDDELHMQMTDLVWEALHFAKDEEFQKHVFQLFEKARKAYKNKDRQKLEKVVEELKELLERLLS

SEQ ID NO: 159 - protein, 64 aa, Artificial Sequence
  Synthetic
NDDELHMQMTDLVWEALHFAKDEEFQKHVFQLFEKATKAYKNKDRQKLEKVVEELKELLERLLS

SEQ ID NO: 160 - protein, 64 aa, Artificial Sequence
  Synthetic
NEDELHMQMTDLVWEALHFAKDEEFQKHVFQLFEKATKAYKNKDRQKLEKVVEELKELLERLLS

SEQ ID NO: 161 - protein, 64 aa, Artificial Sequence
  Synthetic
NDDELHMQMTDLVWEALHFAKTEEFQKHVFQLFEKATKAYKNKDRQKLEKVVEELKELLERLLS

SEQ ID NO: 162 - protein, 64 aa, Artificial Sequence
  Synthetic
NLDELHMQMTDLVYEALHFAKTEEFQKHVFQLFEKATKAYKNKDRQKLEKVVEELKELLERLLS

SEQ ID NO: 163 - protein, 64 aa, Artificial Sequence
  Synthetic
NIDELLMQVTDLIYEALHFAKDEEFQKHAFQLFEKATKAYKNKDKQKLEKVVEELKELLERILS

SEQ ID NO: 164 - protein, 75 aa, Artificial Sequence
  Synthetic
ELEEQVMHVLDQVSELAHELLHKLTGEELERAAYFNWWATEMMLELIKSDDEREIREIEEEAARILEHLEELART

SEQ ID NO: 165 - protein, 20 aa, Artificial Sequence
  Synthetic
GGSGGGGSGGGGSGGGGSGG

SEQ ID NO: 166 - protein, 15 aa, Artificial Sequence
  Synthetic
GGSGGGGSGGGGSGG

SEQ ID NO: 167 - protein, 10 aa, Artificial Sequence
  Synthetic
GGSGGGGSGG

SEQ ID NO: 168 - protein, 9 aa, Artificial Sequence
  Synthetic
GGGGSGGGG

SEQ ID NO: 169 - protein, 7 aa, Artificial Sequence
  Synthetic
GGGSGGG

SEQ ID NO: 170 - protein, 5 aa, Artificial Sequence
  Synthetic
GGSGG

SEQ ID NO: 171 - protein, 7 aa, Artificial Sequence
  Synthetic
GGSGSSG

SEQ ID NO: 172 - protein, 24 aa, Artificial Sequence
  Synthetic
GGASPAAPAPASPAAPAPSAPAGG

SEQ ID NO: 173 - protein, 16 aa, Artificial Sequence
  Synthetic
GGASPAAPAPASPAGG

SEQ ID NO: 174 - protein, 12 aa, Artificial Sequence
  Synthetic
GGASPAAPAPGG

SEQ ID NO: 175 - protein, 11 aa, Artificial Sequence
  Synthetic
GGASPAAPAGG

SEQ ID NO: 176 - protein, 29 aa, Artificial Sequence
  Synthetic
GGSSGPSTPPTPSPSTPPTPSPSPGGSSG

SEQ ID NO: 177 - protein, 25 aa, Artificial Sequence
  Synthetic
GGSSAGSPTSTGTSSATPSGSGTGG

SEQ ID NO: 178 - protein, 25 aa, Artificial Sequence
  Synthetic
GGSSGEAAAKEAAAKEAAAKGSSGG

SEQ ID NO: 179 - protein, 27 aa, Artificial Sequence
  Synthetic
GYIPEAPRDGQAYVRKDGEWVLLSTFL

SEQ ID NO: 180 - protein, 85 aa, Artificial Sequence
  Synthetic
EEAELAYLLGELAYKLGEYRIAIRAYRIALKRDPNNAEAWYNLGNAYYKQGDYDEAIEYYQKALELDPNNAEAKQNLGNAKQKQG

SEQ ID NO: 181 - protein, 119 aa, Artificial Sequence
  Synthetic
EEAELAYLLGELAYKLGEYRIAIRAYRIALKRDPNNAEAWYNLGNAYYKQGDYDEAIEYYQKALELDPNNAEAWYNLGNAYYKQGDYDEAIEYYQKALELDPNNAEAKQNLGNAKQKQG

SEQ ID NO: 182 - protein, 76 aa, Artificial Sequence
  Synthetic
GSEYEIRKALEELKASTAELKRATASLRASTEELKKNPSEDALVENNRLIVEHNAIIVENNRIIAAVLELIVRAIK

SEQ ID NO: 183 - protein, 33 aa, Artificial Sequence
  Synthetic
RMKQIEDKIEEILSKIYHIENEIARIKKLIGER

SEQ ID NO: 184 - protein, 76 aa, Artificial Sequence
  Synthetic
GSEYEIRKALEELKASTAELKRSTASLRASTEELKKNPSEDALVENNRLIVENNAIIVENNRIIAAVLELIVRAIK

SEQ ID NO: 185 - protein, 119 aa, Artificial Sequence
  Synthetic
NLAEKMYKAGNAMYRKGQYTIAIIAYTLALLKDPNNAEAWYNLGNAAYKKGEYDEAIEAYQKALELDPNNAEAWYNLGNAYYKQGDYDEAIEYYQKALELDPNNAEAKQNLGNAKQKQG

SEQ ID NO: 186 - protein, 30 aa, Artificial Sequence
  Synthetic
GEIAKSLKEIAKSLKEIAWSLKEIAKSLKG

SEQ ID NO: 187 - protein, 63 aa, Artificial Sequence
  Synthetic
SEALEELEKALRELKKSTDELERSTEELEKNPSEDALVENNRLIVENNKIIVEVLRIIAKVLK

SEQ ID NO: 188 - protein, 57 aa, Artificial Sequence
  Synthetic
SPELEKALRELKKSTDELERSTEELEKNGSPEALVENNRLIVENNKIIVEVLRIIAK

SEQ ID NO: 189 - protein, 50 aa, Artificial Sequence
  Synthetic
SEKALRELKKSTDELERSTEELEKNGSPEALVENNRLIVENNKIIVEVLR

SEQ ID NO: 190 - DNA, 20 bp, Artificial Sequence
  Synthetic
atgctgcaatcgtgctacaa

SEQ ID NO: 191 - DNA, 17 bp, Artificial Sequence
  Synthetic
gactgccgcctctgctc

SEQ ID NO: 192 - DNA, 11 bp, Artificial Sequence
  Synthetic
aacattgccaa

SEQ ID NO: 193 - protein, 234 aa, Artificial Sequence
  Synthetic
MEKKIGSSAWSHPQFEKGGGSGGGSGGSAWSHPQFEKGGSGSSGGGGDKENILQKIYEIMKTLDQLGHAEASMQVSDLIYEFMKQGDERLLEEAERLLEEVERGGGGSGGGGSGGGGSGGGGSGGGGSGGGGSGGGGSGGGGSGGGGSGGGGSGGGGSGGGGSGGGGSGGGGSGGGGSDKENILQKIYEIMKTLDQLGHAEASMQVSDLIYEFMKQGDERLLEEAERLLEEVER

SEQ ID NO: 194 - protein, 234 aa, Artificial Sequence
  Synthetic
MEKKIGSSAWSHPQFEKGGGSGGGSGGSAWSHPQFEKGGSGSSGGGGDKENILQKIYEIMKTLDQLGHAEASMQVSDLIYEFMKQGDERLLEEAERLLEEVERAGSGGSGGSGGSPVPSTPPTPSPSTPPTPSPSPVPSTPPTPSPSTPPTPSPSPVPSTPPTPSPSTPPTPSPSASGDKENILQKIYEIMKTLDQLGHAEASMQVSDLIYEFMKQGDERLLEEAERLLEEVER

SEQ ID NO: 195 - protein, 250 aa, Artificial Sequence
  Synthetic
MEKKIGSSAWSHPQFEKGGGSGGGSGGSAWSHPQFEKGGSGSSGGGGNDDELHMQMTDLVYEALHFAKDEEIQKHVFQLFEKATKAYKNKDRQKLEKVVEELKELLERLLSGGGGSGGGGSGGGGSGGGGSGGGGSGGGGSGGGGSGGGGSGGGGSGGGGSGGGGSGGGGSGGGGSGGGGSGGGGSNDDELHMQMTDLVYEALHFAKDEEIQKHVFQLFEKATKAYKNKDRQKLEKVVEELKELLERLLS

SEQ ID NO: 196 - protein, 250 aa, Artificial Sequence
  Synthetic
MEKKIGSSAWSHPQFEKGGGSGGGSGGSAWSHPQFEKGGSGSSGGGGNDDELHMQMTDLVYEALHFAKDEEIQKHVFQLFEKATKAYKNKDRQKLEKVVEELKELLERLLSAGSGGSGGSGGSPVPSTPPTPSPSTPPTPSPSPVPSTPPTPSPSTPPTPSPSPVPSTPPTPSPSTPPTPSPSASGNDDELHMQMTDLVYEALHFAKDEEIQKHVFQLFEKATKAYKNKDRQKLEKVVEELKELLERLLS

SEQ ID NO: 197 - protein, 242 aa, Artificial Sequence
  Synthetic
MEKKIGSSAWSHPQFEKGGGSGGGSGGSAWSHPQFEKGGSGSSGGGGDKENILQKIYEIMKTLDQLGHAEASMQVSDLIYEFMKQGDERLLEEAERLLEEVERGGGGSGGGGSGGGGSGGGGSGGGGSGGGGSGGGGSGGGGSGGGGSGGGGSGGGGSGGGGSGGGGSGGGGSGGGGSNDDELHMQMTDLVYEALHFAKDEEIQKHVFQLFEKATKAYKNKDRQKLEKVVEELKELLERLLS

SEQ ID NO: 198 - protein, 242 aa, Artificial Sequence
  Synthetic
MEKKIGSSAWSHPQFEKGGGSGGGSGGSAWSHPQFEKGGSGSSGGGGNDDELHMQMTDLVYEALHFAKDEEIQKHVFQLFEKATKAYKNKDRQKLEKVVEELKELLERLLSGGGGSGGGGSGGGGSGGGGSGGGGSGGGGSGGGGSGGGGSGGGGSGGGGSGGGGSGGGGSGGGGSGGGGSGGGGSDKENILQKIYEIMKTLDQLGHAEASMQVSDLIYEFMKQGDERLLEEAERLLEEVER

SEQ ID NO: 199 - protein, 242 aa, Artificial Sequence
  Synthetic
MEKKIGSSAWSHPQFEKGGGSGGGSGGSAWSHPQFEKGGSGSSGGGGDKENILQKIYEIMKTLDQLGHAEASMQVSDLIYEFMKQGDERLLEEAERLLEEVERAGSGGSGGSGGSPVPSTPPTPSPSTPPTPSPSPVPSTPPTPSPSTPPTPSPSPVPSTPPTPSPSTPPTPSPSASGNDDELHMQMTDLVYEALHFAKDEEIQKHVFQLFEKATKAYKNKDRQKLEKVVEELKELLERLLS

SEQ ID NO: 200 - protein, 242 aa, Artificial Sequence
  Synthetic
MEKKIGSSAWSHPQFEKGGGSGGGSGGSAWSHPQFEKGGSGSSGGGGNDDELHMQMTDLVYEALHFAKDEEIQKHVFQLFEKATKAYKNKDRQKLEKVVEELKELLERLLSAGSGGSGGSGGSPVPSTPPTPSPSTPPTPSPSPVPSTPPTPSPSTPPTPSPSPVPSTPPTPSPSTPPTPSPSASGDKENILQKIYEIMKTLDQLGHAEASMQVSDLIYEFMKQGDERLLEEAERLLEEVER

SEQ ID NO: 201 - protein, 169 aa, Artificial Sequence
  Synthetic
MEKKISAWSHPQFEKGGGSGGGSGGSAWSHPQFEKGGSGSSGDKEWILQKIYEIMRLLDELGHAEASMRVSDLIYEFMKKGDERLLEEAERLLEEVERGGGGSGGGGSGGGGSDKEWILQKIYEIMRLLDELGHAEASMRVSDLIYEFMKKGDERLLEEAERLLEEVER

SEQ ID NO: 202 - protein, 185 aa, Artificial Sequence
  Synthetic
MEKKISAWSHPQFEKGGGSGGGSGGSAWSHPQFEKGGSGSSGNDDELHMLMTDLVYEALHFAKDEEIKKRVFQLFELADKAYKNNDRQKLEKVVEELKELLERLLSGGGGSGGGGSGGGGSNDDELHMLMTDLVYEALHFAKDEEIKKRVFQLFELADKAYKNNDRQKLEKVVEELKELLERLLS

SEQ ID NO: 203 - protein, 174 aa, Artificial Sequence
  Synthetic
MEKKISAWSHPQFEKGGGSGGGSGGSAWSHPQFEKGGSGSSGDKEWILQKIYEIMRLLDELGHAEASMRVSDLIYEFMKKGDERLLEEAERLLEEVERGGGGSGGGGSGGGGSGGGGSDKEWILQKIYEIMRLLDELGHAEASMRVSDLIYEFMKKGDERLLEEAERLLEEVER

SEQ ID NO: 204 - protein, 190 aa, Artificial Sequence
  Synthetic
MEKKISAWSHPQFEKGGGSGGGSGGSAWSHPQFEKGGSGSSGNDDELHMLMTDLVYEALHFAKDEEIKKRVFQLFELADKAYKNNDRQKLEKVVEELKELLERLLSGGGGSGGGGSGGGGSGGGGSNDDELHMLMTDLVYEALHFAKDEEIKKRVFQLFELADKAYKNNDRQKLEKVVEELKELLERLLS

SEQ ID NO: 205 - protein, 230 aa, Artificial Sequence
  Synthetic
MEKKISAWSHPQFEKGGSGSSGDKEWILQKIYEIMRLLDELGHAEASMRVSDLIYEFMKKGDERLLEEAERLLEEVERGSSGSGSSGSGSSGSGSSGSDKEWILQKIYEIMRLLDELGHAEASMRVSDLIYEFMKKGDERLLEEAERLLEEVERGSSSGGSSSGGSSSGGSSSGDKEWILQKIYEIMRLLDELGHAEASMRVSDLIYEFMKKGDERLLEEAERLLEEVER

SEQ ID NO: 206 - protein, 254 aa, Artificial Sequence
  Synthetic
MEKKISAWSHPQFEKGGSGSSGNDDELHMLMTDLVYEALHFAKDEEIKKRVFQLFELADKAYKNNDRQKLEKVVEELKELLERLLSGSSGSGSSGSGSSGSGSSGSNDDELHMLMTDLVYEALHFAKDEEIKKRVFQLFELADKAYKNNDRQKLEKVVEELKELLERLLSGSSSGGSSSGGSSSGGSSSGNDDELHMLMTDLVYEALHFAKDEEIKKRVFQLFELADKAYKNNDRQKLEKVVEELKELLERLLS

SEQ ID NO: 207 - protein, 174 aa, Artificial Sequence
  Synthetic
MEKKISAWSHPQFEKGGGSGGGSGGSAWSHPQFEKGGSGSSGDKEWILQKIYEIMRLLDELGHAEASMRVSDLIYEFMKKGDERLLEEAERLLEEVERGSAGGSPAGSPTSTGTSTSGDKEWILQKIYEIMRLLDELGHAEASMRVSDLIYEFMKKGDERLLEEAERLLEEVER

SEQ ID NO: 208 - protein, 250 aa, Artificial Sequence
  Synthetic
MEKKISAWSHPQFEKGGGSGGGSGGSAWSHPQFEKGGSGSSGDKEWILQKIYEIMRLLDELGHAEASMRVSDLIYEFMKKGDERLLEEAERLLEEVERGSAGGSPAGSPTSTGTSGSGDKEWILQKIYEIMRLLDELGHAEASMRVSDLIYEFMKKGDERLLEEAERLLEEVERGSAGGSPAGSPTSTGTSGSGDKEWILQKIYEIMRLLDELGHAEASMRVSDLIYEFMKKGDERLLEEAERLLEEVER

SEQ ID NO: 209 - protein, 190 aa, Artificial Sequence
  Synthetic
MEKKISAWSHPQFEKGGGSGGGSGGSAWSHPQFEKGGSGSSGNDDELHMLMTDLVYEALHFAKDEEIKKRVFQLFELADKAYKNNDRQKLEKVVEELKELLERLLSGSAGGSPAGSPTSTGTSGSGNDDELHMLMTDLVYEALHFAKDEEIKKRVFQLFELADKAYKNNDRQKLEKVVEELKELLERLLS

SEQ ID NO: 210 - protein, 274 aa, Artificial Sequence
  Synthetic
MEKKISAWSHPQFEKGGGSGGGSGGSAWSHPQFEKGGSGSSGNDDELHMLMTDLVYEALHFAKDEEIKKRVFQLFELADKAYKNNDRQKLEKVVEELKELLERLLSGSAGGSPAGSPTSTGTSGSGNDDELHMLMTDLVYEALHFAKDEEIKKRVFQLFELADKAYKNNDRQKLEKVVEELKELLERLLSGSAGGSPAGSPTSTGTSGSGNDDELHMLMTDLVYEALHFAKDEEIKKRVFQLFELADKAYKNNDRQKLEKVVEELKELLERLLS

SEQ ID NO: 211 - protein, 233 aa, Artificial Sequence
  Synthetic
MEKKISSGDKEWILQKIYEIMRLLDELGHAEASMRVSDLIYEFMKKGDERLLEEAERLLEEVERGSSGSGSSGSGSSGSGSSGSDKEWILQKIYEIMRLLDELGHAEASMRVSDLIYEFMKKGDERLLEEAERLLEEVERGSSSGGSSSGGSSSGGSSSGDKEWILQKIYEIMRLLDELGHAEASMRVSDLIYEFMKKGDERLLEEAERLLEEVERGGSGSSGSAWSHPQFEK

SEQ ID NO: 212 - protein, 257 aa, Artificial Sequence
  Synthetic
MEKKISSGNDDELHMLMTDLVYEALHFAKDEEIKKRVFQLFELADKAYKNNDRQKLEKVVEELKELLERLLSGSSGSGSSGSGSSGSGSSGSNDDELHMLMTDLVYEALHFAKDEEIKKRVFQLFELADKAYKNNDRQKLEKVVEELKELLERLLSGSSSGGSSSGGSSSGGSSSGNDDELHMLMTDLVYEALHFAKDEEIKKRVFQLFELADKAYKNNDRQKLEKVVEELKELLERLLSGGSGSSGSAWSHPQFEK

SEQ ID NO: 213 - protein, 260 aa, Artificial Sequence
  Synthetic
MEKKISAWSHPQFEKGGGSGGGSGGSAWSHPQFEKGGSGSSGDKEWILQKIYEIMRLLDELGHAEASMRVSDLIYEFMKKGDERLLEEAERLLEEVERGGSSAGSPTSTGTSSATPSGSGTGGDKEWILQKIYEIMRLLDELGHAEASMRVSDLIYEFMKKGDERLLEEAERLLEEVERGGSSAGSPTSTGTSSATPSGSGTGGDKEWILQKIYEIMRLLDELGHAEASMRVSDLIYEFMKKGDERLLEEAERLLEEVER

SEQ ID NO: 214 - protein, 284 aa, Artificial Sequence
  Synthetic
MEKKISAWSHPQFEKGGGSGGGSGGSAWSHPQFEKGGSGSSGNDDELHMLMTDLVYEALHFAKDEEIKKRVFQLFELADKAYKNNDRQKLEKVVEELKELLERLLSGGSSAGSPTSTGTSSATPSGSGTGGNDDELHMLMTDLVYEALHFAKDEEIKKRVFQLFELADKAYKNNDRQKLEKVVEELKELLERLLSGGSSAGSPTSTGTSSATPSGSGTGGNDDELHMLMTDLVYEALHFAKDEEIKKRVFQLFELADKAYKNNDRQKLEKVVEELKELLERLLS

SEQ ID NO: 215 - protein, 179 aa, Artificial Sequence
  Synthetic
MEKKISAWSHPQFEKGGGSGGGSGGSAWSHPQFEKGGSGSSGDKENILQKIYEIMKTLEQLGHAEASMQVSDLIYEFMKQGDERLLEEAERLLEEVERGGSSGGGSSGGGSSGGGSSGGGSSGDKENILQKIYEIMKTLEQLGHAEASMQVSDLIYEFMKQGDERLLEEAERLLEEVER

SEQ ID NO: 216 - protein, 179 aa, Artificial Sequence
  Synthetic
MEKKISAWSHPQFEKGGGSGGGSGGSAWSHPQFEKGGSGSSGDKENILQKIYEIMKTLEQLGHAEASMQVSDLIYEFMKQGDERLLEEAERLLEEVERGGSSAGSPTSTGTSSATPSGSGTGGDKENILQKIYEIMKTLEQLGHAEASMQVSDLIYEFMKQGDERLLEEAERLLEEVER

SEQ ID NO: 217 - protein, 179 aa, Artificial Sequence
  Synthetic
MEKKISAWSHPQFEKGGGSGGGSGGSAWSHPQFEKGGSGSSGDKENILQKIYEIMKTLEQLGHAEASMQVSDLIYEFMKQGDERLLEEAERLLEEVERGGSSGEAAAKEAAAKEAAAKGSSGGDKENILQKIYEIMKTLEQLGHAEASMQVSDLIYEFMKQGDERLLEEAERLLEEVER

SEQ ID NO: 218 - protein, 183 aa, Artificial Sequence
  Synthetic
MEKKISAWSHPQFEKGGGSGGGSGGSAWSHPQFEKGGSGSSGDKENILQKIYEIMKTLEQLGHAEASMQVSDLIYEFMKQGDERLLEEAERLLEEVERGGSSGPSTPPTPSPSTPPTPSPSPGGSSGDKENILQKIYEIMKTLEQLGHAEASMQVSDLIYEFMKQGDERLLEEAERLLEEVER

SEQ ID NO: 219 - protein, 239 aa, Artificial Sequence
  Synthetic
MEKKISAWSHPQFEKGGGSGGGSGGSAWSHPQFEKGGSGSSGDKENILQKIYEIMKTLEQLGHAEASMQVSDLIYEFMKQGDERLLEEAERLLEEVERGGSSGQIFVKTLTGKTITLEVEPSDTIENVKAKIQDKEGIPPDQQRLIFAGKQLEDGRTLSDYNIQKESTLHLVLRLRGGGGSSGDKENILQKIYEIMKTLEQLGHAEASMQVSDLIYEFMKQGDERLLEEAERLLEEVER

SEQ ID NO: 220 - protein, 260 aa, Artificial Sequence
  Synthetic
MEKKISAWSHPQFEKGGGSGGGSGGSAWSHPQFEKGGSGSSGDKENILQKIYEIMKTLEQLGHAEASMQVSDLIYEFMKQGDERLLEEAERLLEEVERGGSSAGSPTSTGTSSATPSGSGTGGDKENILQKIYEIMKTLEQLGHAEASMQVSDLIYEFMKQGDERLLEEAERLLEEVERGGSSAGSPTSTGTSSATPSGSGTGGDKENILQKIYEIMKTLEQLGHAEASMQVSDLIYEFMKQGDERLLEEAERLLEEVER

SEQ ID NO: 221 - protein, 260 aa, Artificial Sequence
  Synthetic
MEKKISAWSHPQFEKGGGSGGGSGGSAWSHPQFEKGGSGSSGDKENILQKIYEIMKTLEQLGHAEASMQVSDLIYEFMKQGDERLLEEAERLLEEVERGGSSGEAAAKEAAAKEAAAKGSSGGDKENILQKIYEIMKTLEQLGHAEASMQVSDLIYEFMKQGDERLLEEAERLLEEVERGGSSGEAAAKEAAAKEAAAKGSSGGDKENILQKIYEIMKTLEQLGHAEASMQVSDLIYEFMKQGDERLLEEAERLLEEVER

SEQ ID NO: 222 - protein, 268 aa, Artificial Sequence
  Synthetic
MEKKISAWSHPQFEKGGGSGGGSGGSAWSHPQFEKGGSGSSGDKENILQKIYEIMKTLEQLGHAEASMQVSDLIYEFMKQGDERLLEEAERLLEEVERGGSSGPSTPPTPSPSTPPTPSPSPGGSSGDKENILQKIYEIMKTLEQLGHAEASMQVSDLIYEFMKQGDERLLEEAERLLEEVERGGSSGPSTPPTPSPSTPPTPSPSPGGSSGDKENILQKIYEIMKTLEQLGHAEASMQVSDLIYEFMKQGDERLLEEAERLLEEVER

SEQ ID NO: 223 - protein, 380 aa, Artificial Sequence
  Synthetic
MEKKISAWSHPQFEKGGGSGGGSGGSAWSHPQFEKGGSGSSGDKENILQKIYEIMKTLEQLGHAEASMQVSDLIYEFMKQGDERLLEEAERLLEEVERGGSSGQIFVKTLTGKTITLEVEPSDTIENVKAKIQDKEGIPPDQQRLIFAGKQLEDGRTLSDYNIQKESTLHLVLRLRGGGGSSGDKENILQKIYEIMKTLEQLGHAEASMQVSDLIYEFMKQGDERLLEEAERLLEEVERGGSSGQIFVKTLTGKTITLEVEPSDTIENVKAKIQDKEGIPPDQQRLIFAGKQLEDGRTLSDYNIQKESTLHLVLRLRGGGGSSGDKENILQKIYEIMKTLEQLGHAEASMQVSDLIYEFMKQGDERLLEEAERLLEEVER

SEQ ID NO: 224 - protein, 179 aa, Artificial Sequence
  Synthetic
MEKKISAWSHPQFEKGGGSGGGSGGSAWSHPQFEKGGSGSSGDKENVLQKIYEIMKELERLGHAEASMQVSDLIYEFMKTKDENLLEEAERLLEEVKRGGSSGGGSSGGGSSGGGSSGGGSSGDKENVLQKIYEIMKELERLGHAEASMQVSDLIYEFMKTKDENLLEEAERLLEEVKR

SEQ ID NO: 225 - protein, 183 aa, Artificial Sequence
  Synthetic
MEKKISAWSHPQFEKGGGSGGGSGGSAWSHPQFEKGGSGSSGDKENVLQKIYEIMKELERLGHAEASMQVSDLIYEFMKTKDENLLEEAERLLEEVKRGGSSGPSTPPTPSPSTPPTPSPSPGGSSGDKENVLQKIYEIMKELERLGHAEASMQVSDLIYEFMKTKDENLLEEAERLLEEVKR

SEQ ID NO: 226 - protein, 195 aa, Artificial Sequence
  Synthetic
MEKKISAWSHPQFEKGGGSGGGSGGSAWSHPQFEKGGSGSSGNLDELHMQMTDLVYEALHFAKDEEFQKHVFQLFEKATKAYKNKDRQKLEKVVEELKELLERLLSGGSSGGGSSGGGSSGGGSSGGGSSGNLDELHMQMTDLVYEALHFAKDEEFQKHVFQLFEKATKAYKNKDRQKLEKVVEELKELLERLLS

SEQ ID NO: 227 - protein, 199 aa, Artificial Sequence
  Synthetic
MEKKISAWSHPQFEKGGGSGGGSGGSAWSHPQFEKGGSGSSGNLDELHMQMTDLVYEALHFAKDEEFQKHVFQLFEKATKAYKNKDRQKLEKVVEELKELLERLLSGGSSGPSTPPTPSPSTPPTPSPSPGGSSGNLDELHMQMTDLVYEALHFAKDEEFQKHVFQLFEKATKAYKNKDRQKLEKVVEELKELLERLLS

SEQ ID NO: 228 - protein, 179 aa, Artificial Sequence
  Synthetic
MEKKIDKENVLQKIYEIMKELERLGHAEASMQVSDLIYEFMKTKDENLLEEAERLLEEVKRGGSSGGGSSGGGSSGGGSSGGGSSGDKENVLQKIYEIMKELERLGHAEASMQVSDLIYEFMKTKDENLLEEAERLLEEVKRGGSGSSGSAWSHPQFEKGGGSGGGSGGSAWSHPQFEK

SEQ ID NO: 229 - protein, 183 aa, Artificial Sequence
  Synthetic
MEKKIDKENVLQKIYEIMKELERLGHAEASMQVSDLIYEFMKTKDENLLEEAERLLEEVKRGGSSGPSTPPTPSPSTPPTPSPSPGGSSGDKENVLQKIYEIMKELERLGHAEASMQVSDLIYEFMKTKDENLLEEAERLLEEVKRGGSGSSGSAWSHPQFEKGGGSGGGSGGSAWSHPQFEK

SEQ ID NO: 230 - protein, 195 aa, Artificial Sequence
  Synthetic
MEKKINLDELHMQMTDLVYEALHFAKDEEFQKHVFQLFEKATKAYKNKDRQKLEKVVEELKELLERLLSGGSSGGGSSGGGSSGGGSSGGGSSGNLDELHMQMTDLVYEALHFAKDEEFQKHVFQLFEKATKAYKNKDRQKLEKVVEELKELLERLLSGGSGSSGSAWSHPQFEKGGGSGGGSGGSAWSHPQFEK

SEQ ID NO: 231 - protein, 199 aa, Artificial Sequence
  Synthetic
MEKKINLDELHMQMTDLVYEALHFAKDEEFQKHVFQLFEKATKAYKNKDRQKLEKVVEELKELLERLLSGGSSGPSTPPTPSPSTPPTPSPSPGGSSGNLDELHMQMTDLVYEALHFAKDEEFQKHVFQLFEKATKAYKNKDRQKLEKVVEELKELLERLLSGGSGSSGSAWSHPQFEKGGGSGGGSGGSAWSHPQFEK

SEQ ID NO: 232 - protein, 240 aa, Artificial Sequence
  Synthetic
MEKKISAWSHPQFEKGGSGSSGDKENVLQKIYEIMKELERLGHAEASMQVSDLIYEFMKTKDENLLEEAERLLEEVKRGGSSGGGSSGGGSSGGGSSGGGSSGDKENVLQKIYEIMKELERLGHAEASMQVSDLIYEFMKTKDENLLEEAERLLEEVKRGGSSGGGSSGGGSSGGGSSGGGSSGDKENVLQKIYEIMKELERLGHAEASMQVSDLIYEFMKTKDENLLEEAERLLEEVKR

SEQ ID NO: 233 - protein, 248 aa, Artificial Sequence
  Synthetic
MEKKISAWSHPQFEKGGSGSSGDKENVLQKIYEIMKELERLGHAEASMQVSDLIYEFMKTKDENLLEEAERLLEEVKRGGSSGPSTPPTPSPSTPPTPSPSPGGSSGDKENVLQKIYEIMKELERLGHAEASMQVSDLIYEFMKTKDENLLEEAERLLEEVKRGGSSGPSTPPTPSPSTPPTPSPSPGGSSGDKENVLQKIYEIMKELERLGHAEASMQVSDLIYEFMKTKDENLLEEAERLLEEVKR

SEQ ID NO: 234 - protein, 264 aa, Artificial Sequence
  Synthetic
MEKKISAWSHPQFEKGGSGSSGNLDELHMQMTDLVYEALHFAKDEEFQKHVFQLFEKATKAYKNKDRQKLEKVVEELKELLERLLSGGSSGGGSSGGGSSGGGSSGGGSSGNLDELHMQMTDLVYEALHFAKDEEFQKHVFQLFEKATKAYKNKDRQKLEKVVEELKELLERLLSGGSSGGGSSGGGSSGGGSSGGGSSGNLDELHMQMTDLVYEALHFAKDEEFQKHVFQLFEKATKAYKNKDRQKLEKVVEELKELLERLLS

SEQ ID NO: 235 - protein, 272 aa, Artificial Sequence
  Synthetic
MEKKISAWSHPQFEKGGSGSSGNLDELHMQMTDLVYEALHFAKDEEFQKHVFQLFEKATKAYKNKDRQKLEKVVEELKELLERLLSGGSSGPSTPPTPSPSTPPTPSPSPGGSSGNLDELHMQMTDLVYEALHFAKDEEFQKHVFQLFEKATKAYKNKDRQKLEKVVEELKELLERLLSGGSSGPSTPPTPSPSTPPTPSPSPGGSSGNLDELHMQMTDLVYEALHFAKDEEFQKHVFQLFEKATKAYKNKDRQKLEKVVEELKELLERLLS

SEQ ID NO: 236 - protein, 240 aa, Artificial Sequence
  Synthetic
MEKKIDKENVLQKIYEIMKELERLGHAEASMQVSDLIYEFMKTKDENLLEEAERLLEEVKRGGSSGGGSSGGGSSGGGSSGGGSSGDKENVLQKIYEIMKELERLGHAEASMQVSDLIYEFMKTKDENLLEEAERLLEEVKRGGSSGGGSSGGGSSGGGSSGGGSSGDKENVLQKIYEIMKELERLGHAEASMQVSDLIYEFMKTKDENLLEEAERLLEEVKRGGSGSSGSAWSHPQFEK

SEQ ID NO: 237 - protein, 248 aa, Artificial Sequence
  Synthetic
MEKKIDKENVLQKIYEIMKELERLGHAEASMQVSDLIYEFMKTKDENLLEEAERLLEEVKRGGSSGPSTPPTPSPSTPPTPSPSPGGSSGDKENVLQKIYEIMKELERLGHAEASMQVSDLIYEFMKTKDENLLEEAERLLEEVKRGGSSGPSTPPTPSPSTPPTPSPSPGGSSGDKENVLQKIYEIMKELERLGHAEASMQVSDLIYEFMKTKDENLLEEAERLLEEVKRGGSGSSGSAWSHPQFEK

SEQ ID NO: 238 - protein, 264 aa, Artificial Sequence
  Synthetic
MEKKINLDELHMQMTDLVYEALHFAKDEEFQKHVFQLFEKATKAYKNKDRQKLEKVVEELKELLERLLSGGSSGGGSSGGGSSGGGSSGGGSSGNLDELHMQMTDLVYEALHFAKDEEFQKHVFQLFEKATKAYKNKDRQKLEKVVEELKELLERLLSGGSSGGGSSGGGSSGGGSSGGGSSGNLDELHMQMTDLVYEALHFAKDEEFQKHVFQLFEKATKAYKNKDRQKLEKVVEELKELLERLLSGGSGSSGSAWSHPQFEK

SEQ ID NO: 239 - protein, 272 aa, Artificial Sequence
  Synthetic
MEKKINLDELHMQMTDLVYEALHFAKDEEFQKHVFQLFEKATKAYKNKDRQKLEKVVEELKELLERLLSGGSSGPSTPPTPSPSTPPTPSPSPGGSSGNLDELHMQMTDLVYEALHFAKDEEFQKHVFQLFEKATKAYKNKDRQKLEKVVEELKELLERLLSGGSSGPSTPPTPSPSTPPTPSPSPGGSSGNLDELHMQMTDLVYEALHFAKDEEFQKHVFQLFEKATKAYKNKDRQKLEKVVEELKELLERLLSGGSGSSGSAWSHPQFEK

SEQ ID NO: 240 - protein, 187 aa, Artificial Sequence
  Synthetic
MEKKISAWSHPQFEKGGGSGGGSGGSAWSHPQFEKGGSGSSGDKENVLQKIYEIMKELERLGHAEASMQVSDLIYEFMKTKDENLLEEAERLLEEVKRGGSSGGGSSGGGSSGGGSSGGGSSGNLDELHMQMTDLVYEALHFAKDEEFQKHVFQLFEKATKAYKNKDRQKLEKVVEELKELLERLLS

SEQ ID NO: 241 - protein, 191 aa, Artificial Sequence
  Synthetic
MEKKISAWSHPQFEKGGGSGGGSGGSAWSHPQFEKGGSGSSGDKENVLQKIYEIMKELERLGHAEASMQVSDLIYEFMKTKDENLLEEAERLLEEVKRGGSSGPSTPPTPSPSTPPTPSPSPGGSSGNLDELHMQMTDLVYEALHFAKDEEFQKHVFQLFEKATKAYKNKDRQKLEKVVEELKELLERLLS

SEQ ID NO: 242 - protein, 187 aa, Artificial Sequence
  Synthetic
MEKKISAWSHPQFEKGGGSGGGSGGSAWSHPQFEKGGSGSSGNLDELHMQMTDLVYEALHFAKDEEFQKHVFQLFEKATKAYKNKDRQKLEKVVEELKELLERLLSGGSSGGGSSGGGSSGGGSSGGGSSGDKENVLQKIYEIMKELERLGHAEASMQVSDLIYEFMKTKDENLLEEAERLLEEVKR

SEQ ID NO: 243 - protein, 191 aa, Artificial Sequence
  Synthetic
MEKKISAWSHPQFEKGGGSGGGSGGSAWSHPQFEKGGSGSSGNLDELHMQMTDLVYEALHFAKDEEFQKHVFQLFEKATKAYKNKDRQKLEKVVEELKELLERLLSGGSSGPSTPPTPSPSTPPTPSPSPGGSSGDKENVLQKIYEIMKELERLGHAEASMQVSDLIYEFMKTKDENLLEEAERLLEEVKR

SEQ ID NO: 244 - protein, 187 aa, Artificial Sequence
  Synthetic
MEKKIDKENVLQKIYEIMKELERLGHAEASMQVSDLIYEFMKTKDENLLEEAERLLEEVKRGGSSGGGSSGGGSSGGGSSGGGSSGNLDELHMQMTDLVYEALHFAKDEEFQKHVFQLFEKATKAYKNKDRQKLEKVVEELKELLERLLSGGSGSSGSAWSHPQFEKGGGSGGGSGGSAWSHPQFEK

SEQ ID NO: 245 - protein, 191 aa, Artificial Sequence
  Synthetic
MEKKIDKENVLQKIYEIMKELERLGHAEASMQVSDLIYEFMKTKDENLLEEAERLLEEVKRGGSSGPSTPPTPSPSTPPTPSPSPGGSSGNLDELHMQMTDLVYEALHFAKDEEFQKHVFQLFEKATKAYKNKDRQKLEKVVEELKELLERLLSGGSGSSGSAWSHPQFEKGGGSGGGSGGSAWSHPQFEK

SEQ ID NO: 246 - protein, 187 aa, Artificial Sequence
  Synthetic
MEKKINLDELHMQMTDLVYEALHFAKDEEFQKHVFQLFEKATKAYKNKDRQKLEKVVEELKELLERLLSGGSSGGGSSGGGSSGGGSSGGGSSGDKENVLQKIYEIMKELERLGHAEASMQVSDLIYEFMKTKDENLLEEAERLLEEVKRGGSGSSGSAWSHPQFEKGGGSGGGSGGSAWSHPQFEK

SEQ ID NO: 247 - protein, 191 aa, Artificial Sequence
  Synthetic
MEKKINLDELHMQMTDLVYEALHFAKDEEFQKHVFQLFEKATKAYKNKDRQKLEKVVEELKELLERLLSGGSSGPSTPPTPSPSTPPTPSPSPGGSSGDKENVLQKIYEIMKELERLGHAEASMQVSDLIYEFMKTKDENLLEEAERLLEEVKRGGSGSSGSAWSHPQFEKGGGSGGGSGGSAWSHPQFEK

SEQ ID NO: 248 - protein, 172 aa, Artificial Sequence
  Synthetic
MEKKISAWSHPQFEKGGGSGGGSGGSAWSHPQFEKGGSGSSGNLDELHMQMTDLVYEALHFAKDEEFQKHVFQLFEKATKAYKNKDRQKLEKVVEELKELLERLLSGGGSGGGSGGDKENVLQKIYEIMKELERLGHAEASMQVSDLIYEFMKTKDENLLEEAERLLEEVKR

SEQ ID NO: 249 - protein, 172 aa, Artificial Sequence
  Synthetic
MEKKISAWSHPQFEKGGGSGGGSGGSAWSHPQFEKGGSGSSGNLDELHMQMTDLVYEALHFAKDEEFQKHVFQLFEKATKAYKNKDRQKLEKVVEELKELLERLLSGGSSGGGSSGDKENVLQKIYEIMKELERLGHAEASMQVSDLIYEFMKTKDENLLEEAERLLEEVKR

SEQ ID NO: 250 - protein, 177 aa, Artificial Sequence
  Synthetic
MEKKISAWSHPQFEKGGGSGGGSGGSAWSHPQFEKGGSGSSGNLDELHMQMTDLVYEALHFAKDEEFQKHVFQLFEKATKAYKNKDRQKLEKVVEELKELLERLLSGGSSGGGSSGGGSSGDKENVLQKIYEIMKELERLGHAEASMQVSDLIYEFMKTKDENLLEEAERLLEEVKR

SEQ ID NO: 251 - protein, 182 aa, Artificial Sequence
  Synthetic
MEKKISAWSHPQFEKGGGSGGGSGGSAWSHPQFEKGGSGSSGNLDELHMQMTDLVYEALHFAKDEEFQKHVFQLFEKATKAYKNKDRQKLEKVVEELKELLERLLSGGSSGGGSSGGGSSGGGSSGDKENVLQKIYEIMKELERLGHAEASMQVSDLIYEFMKTKDENLLEEAERLLEEVKR

SEQ ID NO: 252 - protein, 164 aa, Artificial Sequence
  Synthetic
MEKKISAWSHPQFEKGGGSGGGSGGSAWSHPQFEKGGSGSSGDKENVLQKIYEIMKELERLGHAEASMQVSDLIYEFMKTKDENLLEEAERLLEEVKRGGSSGGGSSGDKENVLQKIYEIMKELERLGHAEASMQVSDLIYEFMKTKDENLLEEAERLLEEVKR

SEQ ID NO: 253 - protein, 169 aa, Artificial Sequence
  Synthetic
MEKKISAWSHPQFEKGGGSGGGSGGSAWSHPQFEKGGSGSSGDKENVLQKIYEIMKELERLGHAEASMQVSDLIYEFMKTKDENLLEEAERLLEEVKRGGSSGGGSSGGGSSGDKENVLQKIYEIMKELERLGHAEASMQVSDLIYEFMKTKDENLLEEAERLLEEVKR

SEQ ID NO: 254 - protein, 174 aa, Artificial Sequence
  Synthetic
MEKKISAWSHPQFEKGGGSGGGSGGSAWSHPQFEKGGSGSSGDKENVLQKIYEIMKELERLGHAEASMQVSDLIYEFMKTKDENLLEEAERLLEEVKRGGSSGGGSSGGGSSGGGSSGDKENVLQKIYEIMKELERLGHAEASMQVSDLIYEFMKTKDENLLEEAERLLEEVKR

SEQ ID NO: 255 - protein, 183 aa, Artificial Sequence
  Synthetic
MSKIKSAWSHPQFEKGGGSGGGSGGSAWSHPQFEKGGSGSSGELEEQVMHVLDQVSELAHELLHKLTGEELERAAYFNWWATEMMLELIKSDDEREIREIEEEARRILEHLEELARKGGSSGGGSSGDKENVLQKIYEIMKELERLGHAEASMQVSDLIYEFMKTKDERLLEEAERLLEEVKR

SEQ ID NO: 256 - protein, 188 aa, Artificial Sequence
  Synthetic
MSKIKSAWSHPQFEKGGGSGGGSGGSAWSHPQFEKGGSGSSGELEEQVMHVLDQVSELAHELLHKLTGEELERAAYFNWWATEMMLELIKSDDEREIREIEEEARRILEHLEELARKGGSSGGGSSGGGSSGDKENVLQKIYEIMKELERLGHAEASMQVSDLIYEFMKTKDERLLEEAERLLEEVKR

SEQ ID NO: 257 - protein, 193 aa, Artificial Sequence
  Synthetic
MSKIKSAWSHPQFEKGGGSGGGSGGSAWSHPQFEKGGSGSSGELEEQVMHVLDQVSELAHELLHKLTGEELERAAYFNWWATEMMLELIKSDDEREIREIEEEARRILEHLEELARKGGSSGGGSSGGGSSGGGSSGDKENVLQKIYEIMKELERLGHAEASMQVSDLIYEFMKTKDERLLEEAERLLEEVKR

SEQ ID NO: 258 - protein, 268 aa, Artificial Sequence
  Synthetic
MSKIKSAWSHPQFEKGGGSGGGSGGSAWSHPQFEKGGSGSSGELEEQVMHVLDQVSELAHELLHKLTGEELERAAYFNWWATEMMLELIKSDDEREIREIEEEARRILEHLEELARKGGSSGGGSSGELEEQVMHVLDQVSELAHELLHKLTGEELERAAYFNWWATEMMLELIKSDDEREIREIEEEARRILEHLEELARKGGSSGGGSSGDKENVLQKIYEIMKELERLGHAEASMQVSDLIYEFMKTKDERLLEEAERLLEEVKR

SEQ ID NO: 259 - protein, 278 aa, Artificial Sequence
  Synthetic
MSKIKSAWSHPQFEKGGGSGGGSGGSAWSHPQFEKGGSGSSGELEEQVMHVLDQVSELAHELLHKLTGEELERAAYFNWWATEMMLELIKSDDEREIREIEEEARRILEHLEELARKGGSSGGGSSGGGSSGELEEQVMHVLDQVSELAHELLHKLTGEELERAAYFNWWATEMMLELIKSDDEREIREIEEEARRILEHLEELARKGGSSGGGSSGGGSSGDKENVLQKIYEIMKELERLGHAEASMQVSDLIYEFMKTKDERLLEEAERLLEEVKR

SEQ ID NO: 260 - protein, 288 aa, Artificial Sequence
  Synthetic
MSKIKSAWSHPQFEKGGGSGGGSGGSAWSHPQFEKGGSGSSGELEEQVMHVLDQVSELAHELLHKLTGEELERAAYFNWWATEMMLELIKSDDEREIREIEEEARRILEHLEELARKGGSSGGGSSGGGSSGGGSSGELEEQVMHVLDQVSELAHELLHKLTGEELERAAYFNWWATEMMLELIKSDDEREIREIEEEARRILEHLEELARKGGSSGGGSSGGGSSGGGSSGDKENVLQKIYEIMKELERLGHAEASMQVSDLIYEFMKTKDERLLEEAERLLEEVKR

SEQ ID NO: 261 - protein, 202 aa, Artificial Sequence
  Synthetic
MSKIKSAWSHPQFEKGGGSGGGSGGSAWSHPQFEKGGSGSSGELEEQVMHVLDQVSELAHELLHKLTGEELERAAYFNWWATEMMLELIKSDDEREIREIEEEARRILEHLEELARKGGSSGGGSSGELEEQVMHVLDQVSELAHELLHKLTGEELERAAYFNWWATEMMLELIKSDDEREIREIEEEARRILEHLEELARK

SEQ ID NO: 262 - protein, 207 aa, Artificial Sequence
  Synthetic
MSKIKSAWSHPQFEKGGGSGGGSGGSAWSHPQFEKGGSGSSGELEEQVMHVLDQVSELAHELLHKLTGEELERAAYFNWWATEMMLELIKSDDEREIREIEEEARRILEHLEELARKGGSSGGGSSGGGSSGELEEQVMHVLDQVSELAHELLHKLTGEELERAAYFNWWATEMMLELIKSDDEREIREIEEEARRILEHLEELARK

SEQ ID NO: 263 - protein, 212 aa, Artificial Sequence
  Synthetic
MSKIKSAWSHPQFEKGGGSGGGSGGSAWSHPQFEKGGSGSSGELEEQVMHVLDQVSELAHELLHKLTGEELERAAYFNWWATEMMLELIKSDDEREIREIEEEARRILEHLEELARKGGSSGGGSSGGGSSGGGSSGELEEQVMHVLDQVSELAHELLHKLTGEELERAAYFNWWATEMMLELIKSDDEREIREIEEEARRILEHLEELARK

SEQ ID NO: 264 - protein, 287 aa, Artificial Sequence
  Synthetic
MSKIKSAWSHPQFEKGGGSGGGSGGSAWSHPQFEKGGSGSSGELEEQVMHVLDQVSELAHELLHKLTGEELERAAYFNWWATEMMLELIKSDDEREIREIEEEARRILEHLEELARKGGSSGGGSSGELEEQVMHVLDQVSELAHELLHKLTGEELERAAYFNWWATEMMLELIKSDDEREIREIEEEARRILEHLEELARKGGSSGGGSSGELEEQVMHVLDQVSELAHELLHKLTGEELERAAYFNWWATEMMLELIKSDDEREIREIEEEARRILEHLEELARK

SEQ ID NO: 265 - protein, 297 aa, Artificial Sequence
  Synthetic
MSKIKSAWSHPQFEKGGGSGGGSGGSAWSHPQFEKGGSGSSGELEEQVMHVLDQVSELAHELLHKLTGEELERAAYFNWWATEMMLELIKSDDEREIREIEEEARRILEHLEELARKGGSSGGGSSGGGSSGELEEQVMHVLDQVSELAHELLHKLTGEELERAAYFNWWATEMMLELIKSDDEREIREIEEEARRILEHLEELARKGGSSGGGSSGGGSSGELEEQVMHVLDQVSELAHELLHKLTGEELERAAYFNWWATEMMLELIKSDDEREIREIEEEARRILEHLEELARK

SEQ ID NO: 266 - protein, 307 aa, Artificial Sequence
  Synthetic
MSKIKSAWSHPQFEKGGGSGGGSGGSAWSHPQFEKGGSGSSGELEEQVMHVLDQVSELAHELLHKLTGEELERAAYFNWWATEMMLELIKSDDEREIREIEEEARRILEHLEELARKGGSSGGGSSGGGSSGGGSSGELEEQVMHVLDQVSELAHELLHKLTGEELERAAYFNWWATEMMLELIKSDDEREIREIEEEARRILEHLEELARKGGSSGGGSSGGGSSGGGSSGELEEQVMHVLDQVSELAHELLHKLTGEELERAAYFNWWATEMMLELIKSDDEREIREIEEEARRILEHLEELARK

SEQ ID NO: 267 - protein, 216 aa, Artificial Sequence
  Synthetic
MEKKISAWSHPQFEKGGGSGGGSGGSAWSHPQFEKGGSGSSGELEEQVMHVLDQVSELAHELLHKLTGEELERAAYFNWWATEMMLELIKSDDEREIREIEEEARRILEHLEELARKGGASPAAPAPASPAAPAPSAPAGGELEEQVMHVLDQVSELAHELLHKLTGEELERAAYFNWWATEMMLELIKSDDEREIREIEEEARRILEHLEELARK

SEQ ID NO: 268 - protein, 186 aa, Artificial Sequence
  Synthetic
MEKKISAWSHPQFEKGGGSGGGSGGSAWSHPQFEKGGSGSSGNLDELHMQMTDLVYEALHFAKDEEFQKHVFQLFEKATKAYKNKDRQKLEKVVEELKELLERLLSGGASPAAPAPASPAAPAPSAPAGGDKENVLQKIYEIMKELERLGHAEASMQVSDLIYEFMKTKDERLLEEAERLLEEVKR

SEQ ID NO: 269 - protein, 197 aa, Artificial Sequence
  Synthetic
MEKKISAWSHPQFEKGGGSGGGSGGSAWSHPQFEKGGSGSSGELEEQVMHVLDQVSELAHELLHKLTGEELERAAYFNWWATEMMLELIKSDDEREIREIEEEARRILEHLEELARKGGASPAAPAPASPAAPAPSAPAGGDKENVLQKIYEIMKELERLGHAEASMQVSDLIYEFMKTKDERLLEEAERLLEEVKR

SEQ ID NO: 270 - protein, 315 aa, Artificial Sequence
  Synthetic
MEKKISAWSHPQFEKGGGSGGGSGGSAWSHPQFEKGGSGSSGELEEQVMHVLDQVSELAHELLHKLTGEELERAAYFNWWATEMMLELIKSDDEREIREIEEEARRILEHLEELARKGGASPAAPAPASPAAPAPSAPAGGELEEQVMHVLDQVSELAHELLHKLTGEELERAAYFNWWATEMMLELIKSDDEREIREIEEEARRILEHLEELARKGGASPAAPAPASPAAPAPSAPAGGELEEQVMHVLDQVSELAHELLHKLTGEELERAAYFNWWATEMMLELIKSDDEREIREIEEEARRILEHLEELARK

SEQ ID NO: 271 - protein, 285 aa, Artificial Sequence
  Synthetic
MEKKISAWSHPQFEKGGGSGGGSGGSAWSHPQFEKGGSGSSGNLDELHMQMTDLVYEALHFAKDEEFQKHVFQLFEKATKAYKNKDRQKLEKVVEELKELLERLLSGGASPAAPAPASPAAPAPSAPAGGELEEQVMHVLDQVSELAHELLHKLTGEELERAAYFNWWATEMMLELIKSDDEREIREIEEEARRILEHLEELARKGGASPAAPAPASPAAPAPSAPAGGDKENVLQKIYEIMKELERLGHAEASMQVSDLIYEFMKTKDERLLEEAERLLEEVKR

SEQ ID NO: 272 - protein, 285 aa, Artificial Sequence
  Synthetic
MEKKISAWSHPQFEKGGGSGGGSGGSAWSHPQFEKGGSGSSGELEEQVMHVLDQVSELAHELLHKLTGEELERAAYFNWWATEMMLELIKSDDEREIREIEEEARRILEHLEELARKGGASPAAPAPASPAAPAPSAPAGGNLDELHMQMTDLVYEALHFAKDEEFQKHVFQLFEKATKAYKNKDRQKLEKVVEELKELLERLLSGGASPAAPAPASPAAPAPSAPAGGDKENVLQKIYEIMKELERLGHAEASMQVSDLIYEFMKTKDERLLEEAERLLEEVKR

SEQ ID NO: 273 - protein, 258 aa, Artificial Sequence
  Synthetic
MEKKISAWSHPQFEKGGGSGGGSGGSAWSHPQFEKGGSGSSGDKENVLQKIYEIMKELERLGHAEASMQVSDLIYEFMKTKDENLLEEAERLLEEVKRGGASPAAPAPASPAAPAPSAPAGGDKENVLQKIYEIMKELERLGHAEASMQVSDLIYEFMKTKDENLLEEAERLLEEVKRGGASPAAPAPASPAAPAPSAPAGGDKENVLQKIYEIMKELERLGHAEASMQVSDLIYEFMKTKDENLLEEAERLLEEVKR

SEQ ID NO: 274 - protein, 315 aa, Artificial Sequence; identical to SEQ ID NO: 270
  Synthetic

SEQ ID NO: 275 - protein, 282 aa, Artificial Sequence
  Synthetic
MEKKISAWSHPQFEKGGGSGGGSGGSAWSHPQFEKGGSGSSGNLDELHMQMTDLVYEALHFAKDEEFQKHVFQLFEKATKAYKNKDRQKLEKVVEELKELLERLLSGGASPAAPAPASPAAPAPSAPAGGNLDELHMQMTDLVYEALHFAKDEEFQKHVFQLFEKATKAYKNKDRQKLEKVVEELKELLERLLSGGASPAAPAPASPAAPAPSAPAGGNLDELHMQMTDLVYEALHFAKDEEFQKHVFQLFEKATKAYKNKDRQKLEKVVEELKELLERLLS

SEQ ID NO: 276 - protein, 296 aa, Artificial Sequence
  Synthetic
MEKKISAWSHPQFEKGGGSGGGSGGSAWSHPQFEKGGSGSSGELEEQVMHVLDQVSELAHELLHKLTGEELERAAYFNWWATEMMLELIKSDDEREIREIEEEARRILEHLEELARKGGASPAAPAPASPAAPAPSAPAGGELEEQVMHVLDQVSELAHELLHKLTGEELERAAYFNWWATEMMLELIKSDDEREIREIEEEARRILEHLEELARKGGASPAAPAPASPAAPAPSAPAGGDKENVLQKIYEIMKELERLGHAEASMQVSDLIYEFMKTKDENLLEEAERLLEEVKR

SEQ ID NO: 277 - protein, 208 aa, Artificial Sequence
  Synthetic
MEKKISAWSHPQFEKGGGSGGGSGGSAWSHPQFEKGGSGSSGELEEQVMHVLDQVSELAHELLHKLTGEELERAAYFNWWATEMMLELIKSDDEREIREIEEEARRILEHLEELARKGGASPAAPAPASPAGGELEEQVMHVLDQVSELAHELLHKLTGEELERAAYFNWWATEMMLELIKSDDEREIREIEEEARRILEHLEELARK

SEQ ID NO: 278 - protein, 203 aa, Artificial Sequence
  Synthetic
MEKKISAWSHPQFEKGGGSGGGSGGSAWSHPQFEKGGSGSSGELEEQVMHVLDQVSELAHELLHKLTGEELERAAYFNWWATEMMLELIKSDDEREIREIEEEARRILEHLEELARKGGASPAAPAGGELEEQVMHVLDQVSELAHELLHKLTGEELERAAYFNWWATEMMLELIKSDDEREIREIEEEARRILEHLEELARK

SEQ ID NO: 279 - protein, 178 aa, Artificial Sequence
  Synthetic
MEKKISAWSHPQFEKGGGSGGGSGGSAWSHPQFEKGGSGSSGNLDELHMQMTDLVYEALHFAKDEEFQKHVFQLFEKATKAYKNKDRQKLEKVVEELKELLERLLSGGASPAAPAPASPAGGDKENVLQKIYEIMKELERLGHAEASMQVSDLIYEFMKTKDERLLEEAERLLEEVKR

SEQ ID NO: 280 - protein, 173 aa, Artificial Sequence
  Synthetic
MEKKISAWSHPQFEKGGGSGGGSGGSAWSHPQFEKGGSGSSGNLDELHMQMTDLVYEALHFAKDEEFQKHVFQLFEKATKAYKNKDRQKLEKVVEELKELLERLLSGGASPAAPAGGDKENVLQKIYEIMKELERLGHAEASMQVSDLIYEFMKTKDERLLEEAERLLEEVKR

SEQ ID NO: 281 - protein, 189 aa, Artificial Sequence
  Synthetic
MEKKISAWSHPQFEKGGGSGGGSGGSAWSHPQFEKGGSGSSGELEEQVMHVLDQVSELAHELLHKLTGEELERAAYFNWWATEMMLELIKSDDEREIREIEEEARRILEHLEELARKGGASPAAPAPASPAGGDKENVLQKIYEIMKELERLGHAEASMQVSDLIYEFMKTKDERLLEEAERLLEEVKR

SEQ ID NO: 282 - protein, 184 aa, Artificial Sequence
  Synthetic
MEKKISAWSHPQFEKGGGSGGGSGGSAWSHPQFEKGGSGSSGELEEQVMHVLDQVSELAHELLHKLTGEELERAAYFNWWATEMMLELIKSDDEREIREIEEEARRILEHLEELARKGGASPAAPAGGDKENVLQKIYEIMKELERLGHAEASMQVSDLIYEFMKTKDERLLEEAERLLEEVKR

SEQ ID NO: 283 - protein, 285 aa, Artificial Sequence
  Synthetic
MEKKISAWSHPQFEKGGGSGGGSGGSAWSHPQFEKGGSGSSGNIDELLMQVTDLIYEALHFAKDEEFQKHAFQLFEKATKAYKNKDKQKLEKVVEELKELLERILSGGASPAAPAPASPAAPAPSAPAGGELEEQVMHVLDQVSELAHELLHKLTGEELERAAYFNWWATEMMLELIKSDDEREIREIEEEARRILEHLEELARKGGASPAAPAPASPAAPAPSAPAGGDKENVLQKIYEIMKELERLGHAEASMQVSDLIYEFMKTKDERLLEEAERLLEEVKR

SEQ ID NO: 284 - protein, 285 aa, Artificial Sequence
  Synthetic
MEKKISAWSHPQFEKGGGSGGGSGGSAWSHPQFEKGGSGSSGELEEQVMHVLDQVSELAHELLHKLTGEELERAAYFNWWATEMMLELIKSDDEREIREIEEEARRILEHLEELARKGGASPAAPAPASPAAPAPSAPAGGNIDELLMQVTDLIYEALHFAKDEEFQKHAFQLFEKATKAYKNKDKQKLEKVVEELKELLERILSGGASPAAPAPASPAAPAPSAPAGGDKENVLQKIYEIMKELERLGHAEASMQVSDLIYEFMKTKDERLLEEAERLLEEVKR

SEQ ID NO: 285 - protein, 315 aa, Artificial Sequence
  Synthetic
MEKKISAWSHPQFEKGGGSGGGSGGSAWSHPQFEKGGSGSSGELEEQVMHVLDQVSELAHELLHKLTGEELERAAYFNWWATEMMLELIKSDDEREIREIEEEAARILEHLEELARTGGASPAAPAPASPAAPAPSAPAGGELEEQVMHVLDQVSELAHELLHKLTGEELERAAYFNWWATEMMLELIKSDDEREIREIEEEAARILEHLEELARTGGASPAAPAPASPAAPAPSAPAGGELEEQVMHVLDQVSELAHELLHKLTGEELERAAYFNWWATEMMLELIKSDDEREIREIEEEAARILEHLEELART

SEQ ID NO: 286 - protein, 258 aa, Artificial Sequence
  Synthetic
MEKKISAWSHPQFEKGGGSGGGSGGSAWSHPQFEKGGSGSSGDKENVLQKIYEIMKELERLGHAEASMQVSDLIYEFMKTKDENLLEEAERLLEEVTRGGASPAAPAPASPAAPAPSAPAGGDKENVLQKIYEIMKELERLGHAEASMQVSDLIYEFMKTKDENLLEEAERLLEEVTRGGASPAAPAPASPAAPAPSAPAGGDKENVLQKIYEIMKELERLGHAEASMQVSDLIYEFMKTKDENLLEEAERLLEEVTR

SEQ ID NO: 287 - protein, 285 aa, Artificial Sequence
  Synthetic
MEKKISAWSHPQFEKGGGSGGGSGGSAWSHPQFEKGGSGSSGNIDELLMQVTDLIYEALHFAKDEEFQKHAFQLFEKATKAYKNKDKQKLEKVVEELKELLERILSGGASPAAPAPASPAAPAPSAPAGGELEEQVMHVLDQVSELAHELLHKLTGEELERAAYFNWWATEMMLELIKSDDEREIREIEEEAARILEHLEELARTGGASPAAPAPASPAAPAPSAPAGGDKENVLQKIYEIMKELERLGHAEASMQVSDLIYEFMKTKDERLLEEAERLLEEVKR

SEQ ID NO: 288 - protein, 285 aa, Artificial Sequence
  Synthetic
MEKKISAWSHPQFEKGGGSGGGSGGSAWSHPQFEKGGSGSSGELEEQVMHVLDQVSELAHELLHKLTGEELERAAYFNWWATEMMLELIKSDDEREIREIEEEAARILEHLEELARTGGASPAAPAPASPAAPAPSAPAGGNIDELLMQVTDLIYEALHFAKDEEFQKHAFQLFEKATKAYKNKDKQKLEKVVEELKELLERILSGGASPAAPAPASPAAPAPSAPAGGDKENVLQKIYEIMKELERLGHAEASMQVSDLIYEFMKTKDERLLEEAERLLEEVKR

SEQ ID NO: 289 - protein, 285 aa, Artificial Sequence
  Synthetic
MEKKISAWSHPQFEKGGGSGGGSGGSAWSHPQFEKGGSGSSGNIDELLMQVTDLIYEALHFAKDEEFQKHAFQLFEKATKAYKNKDKQKLEKVVEELKELLERILSGGASPAAPAPASPAAPAPSAPAGGELEEQVMHVLDQVSELAHELLHKLTGEELERAAYFNWWATEMMLELIKSDDEREIREIEEEARRILEHLEELARKGGASPAAPAPASPAAPAPSAPAGGDKENVLQKIYEIMKELERLGHAEASMQVSDLIYEFMKTKDENLLEEAERLLEEVKR

SEQ ID NO: 290 - protein, 285 aa, Artificial Sequence
  Synthetic
MEKKISAWSHPQFEKGGGSGGGSGGSAWSHPQFEKGGSGSSGELEEQVMHVLDQVSELAHELLHKLTGEELERAAYFNWWATEMMLELIKSDDEREIREIEEEARRILEHLEELARKGGASPAAPAPASPAAPAPSAPAGGNIDELLMQVTDLIYEALHFAKDEEFQKHAFQLFEKATKAYKNKDKQKLEKVVEELKELLERILSGGASPAAPAPASPAAPAPSAPAGGDKENVLQKIYEIMKELERLGHAEASMQVSDLIYEFMKTKDENLLEEAERLLEEVKR

SEQ ID NO: 291 - protein, 285 aa, Artificial Sequence
  Synthetic
MEKKISAWSHPQFEKGGGSGGGSGGSAWSHPQFEKGGSGSSGNIDELLMQVTDLIYEALHFAKDEEFQKHAFQLFEKATKAYKNKDKQKLEKVVEELKELLERILSGGASPAAPAPASPAAPAPSAPAGGELEEQVMHVLDQVSELAHELLHKLTGEELERAAYFNWWATEMMLELIKSDDEREIREIEEEAARILEHLEELARTGGASPAAPAPASPAAPAPSAPAGGDKENVLQKIYEIMKELERLGHAEASMQVSDLIYEFMKTKDENLLEEAERLLEEVKR

SEQ ID NO: 292 - protein, 285 aa, Artificial Sequence
  Synthetic
MEKKISAWSHPQFEKGGGSGGGSGGSAWSHPQFEKGGSGSSGELEEQVMHVLDQVSELAHELLHKLTGEELERAAYFNWWATEMMLELIKSDDEREIREIEEEAARILEHLEELARTGGASPAAPAPASPAAPAPSAPAGGNIDELLMQVTDLIYEALHFAKDEEFQKHAFQLFEKATKAYKNKDKQKLEKVVEELKELLERILSGGASPAAPAPASPAAPAPSAPAGGDKENVLQKIYEIMKELERLGHAEASMQVSDLIYEFMKTKDENLLEEAERLLEEVKR

SEQ ID NO: 293 - protein, 270 aa, Artificial Sequence
  Synthetic
MEKKIHHHHHHSGENLYFQSGGSGSSGELEEQVMHVLDQVSELAHELLHKLTGEELERAAYFNWWATEMMLELIKSDDEREIREIEEEARRILEHLEELARKGGASPAAPAPASPAAPAPSAPAGGNIDELLMQVTDLIYEALHFAKDEEFQKHAFQLFEKATKAYKNKDKQKLEKVVEELKELLERILSGGASPAAPAPASPAAPAPSAPAGGDKENVLQKIYEIMKELERLGHAEASMQVSDLIYEFMKTKDENLLEEAERLLEEVKR

SEQ ID NO: 294 - protein, 270 aa, Artificial Sequence
  Synthetic
MEKKIHHHHHHSGENLYFQSGGSGSSGELEEQVMHVLDQVSELAHELLHKLTGEELERAAYFNWWATEMMLELIKSDDEREIREIEEEAARILEHLEELARTGGASPAAPAPASPAAPAPSAPAGGNIDELLMQVTDLIYEALHFAKDEEFQKHAFQLFEKATKAYKNKDKQKLEKVVEELKELLERILSGGASPAAPAPASPAAPAPSAPAGGDKENVLQKIYEIMKELERLGHAEASMQVSDLIYEFMKTKDENLLEEAERLLEEVKR

SEQ ID NO: 295 - protein, 297 aa, Artificial Sequence
  Synthetic
MEKKIDYKDDDDKGSGSSAWSHPQFEKGGGSGGGSGGSAWSHPQFEKGGSGSSGELEEQVMHVLDQVSELAHELLHKLTGEELERAAYFNWWATEMMLELIKSDDEREIREIEEEARRILEHLEELARKGGASPAAPAPASPAAPAPSAPAGGNIDELLMQVTDLIYEALHFAKDEEFQKHAFQLFEKATKAYKNKDKQKLEKVVEELKELLERILSGGASPAAPAPASPAAPAPSAPAGGDKENVLQKIYEIMKELERLGHAEASMQVSDLIYEFMKTKDENLLEEAERLLEEVKR

SEQ ID NO: 296 - protein, 311 aa, Artificial Sequence
  Synthetic
MEKKIDYKDHDGDYKDHDIDYKDDDDKGSGSSAWSHPQFEKGGGSGGGSGGSAWSHPQFEKGGSGSSGELEEQVMHVLDQVSELAHELLHKLTGEELERAAYFNWWATEMMLELIKSDDEREIREIEEEARRILEHLEELARKGGASPAAPAPASPAAPAPSAPAGGNIDELLMQVTDLIYEALHFAKDEEFQKHAFQLFEKATKAYKNKDKQKLEKVVEELKELLERILSGGASPAAPAPASPAAPAPSAPAGGDKENVLQKIYEIMKELERLGHAEASMQVSDLIYEFMKTKDENLLEEAERLLEEVKR

SEQ ID NO: 297 - protein, 299 aa, Artificial Sequence
  Synthetic
MEKKIEQKLISEEDLGSGSSAWSHPQFEKGGGSGGGSGGSAWSHPQFEKGGSGSSGELEEQVMHVLDQVSELAHELLHKLTGEELERAAYFNWWATEMMLELIKSDDEREIREIEEEARRILEHLEELARKGGASPAAPAPASPAAPAPSAPAGGNIDELLMQVTDLIYEALHFAKDEEFQKHAFQLFEKATKAYKNKDKQKLEKVVEELKELLERILSGGASPAAPAPASPAAPAPSAPAGGDKENVLQKIYEIMKELERLGHAEASMQVSDLIYEFMKTKDENLLEEAERLLEEVKR

SEQ ID NO: 298 - protein, 303 aa, Artificial Sequence
  Synthetic
MEKKIDYKDHDGDYKDHDIDYKDDDDKGSGSSAWSHPQFEKGGGSGGGSGGSAWSHPQFEKGGSGSSGELEEQVMHVLDQVSELAHELLHKLTGEELERAAYFNWWATEMMLELIKSDDEREIREIEEEARRILEHLEELARKGGASPAAPAPASPAAPAPSAPAGGNIDELLMQVTDLIYEALHFAKDEEFQKHAFQLFEKATKAYKNKDKQKLEKVVEELKELLERILSGGASPAAPAPASPAGGDKENVLQKIYEIMKELERLGHAEASMQVSDLIYEFMKTKDENLLEEAERLLEEVKR

SEQ ID NO: 299 - protein, 295 aa, Artificial Sequence
  Synthetic
MEKKIDYKDHDGDYKDHDIDYKDDDDKGSGSSAWSHPQFEKGGGSGGGSGGSAWSHPQFEKGGSGSSGELEEQVMHVLDQVSELAHELLHKLTGEELERAAYFNWWATEMMLELIKSDDEREIREIEEEARRILEHLEELARKGGASPAAPAPASPAGGNIDELLMQVTDLIYEALHFAKDEEFQKHAFQLFEKATKAYKNKDKQKLEKVVEELKELLERILSGGASPAAPAPASPAGGDKENVLQKIYEIMKELERLGHAEASMQVSDLIYEFMKTKDENLLEEAERLLEEVKR

SEQ ID NO: 300 - protein, 290 aa, Artificial Sequence
  Synthetic
MEKKIDYKDHDGDYKDHDIDYKDDDDKGSGSSAWSHPQFEKGGGSGGGSGGSAWSHPQFEKGGSGSSGELEEQVMHVLDQVSELAHELLHKLTGEELERAAYFNWWATEMMLELIKSDDEREIREIEEEARRILEHLEELARKGGASPAAPAGGNIDELLMQVTDLIYEALHFAKDEEFQKHAFQLFEKATKAYKNKDKQKLEKVVEELKELLERILSGGASPAAPAPASPAGGDKENVLQKIYEIMKELERLGHAEASMQVSDLIYEFMKTKDENLLEEAERLLEEVKR

SEQ ID NO: 301 - protein, 298 aa, Artificial Sequence
  Synthetic
MEKKIDYKDHDGDYKDHDIDYKDDDDKGSGSSAWSHPQFEKGGGSGGGSGGSAWSHPQFEKGGSGSSGELEEQVMHVLDQVSELAHELLHKLTGEELERAAYFNWWATEMMLELIKSDDEREIREIEEEARRILEHLEELARKGGASPAAPAPASPAAPAPSAPAGGNIDELLMQVTDLIYEALHFAKDEEFQKHAFQLFEKATKAYKNKDKQKLEKVVEELKELLERILSGGASPAAPAGGDKENVLQKIYEIMKELERLGHAEASMQVSDLIYEFMKTKDENLLEEAERLLEEVKR

SEQ ID NO: 302 - protein, 290 aa, Artificial Sequence
  Synthetic
MEKKIDYKDHDGDYKDHDIDYKDDDDKGSGSSAWSHPQFEKGGGSGGGSGGSAWSHPQFEKGGSGSSGELEEQVMHVLDQVSELAHELLHKLTGEELERAAYFNWWATEMMLELIKSDDEREIREIEEEARRILEHLEELARKGGASPAAPAPASPAGGNIDELLMQVTDLIYEALHFAKDEEFQKHAFQLFEKATKAYKNKDKQKLEKVVEELKELLERILSGGASPAAPAGGDKENVLQKIYEIMKELERLGHAEASMQVSDLIYEFMKTKDENLLEEAERLLEEVKR

SEQ ID NO: 303 - protein, 285 aa, Artificial Sequence
  Synthetic
MEKKIDYKDHDGDYKDHDIDYKDDDDKGSGSSAWSHPQFEKGGGSGGGSGGSAWSHPQFEKGGSGSSGELEEQVMHVLDQVSELAHELLHKLTGEELERAAYFNWWATEMMLELIKSDDEREIREIEEEARRILEHLEELARKGGASPAAPAGGNIDELLMQVTDLIYEALHFAKDEEFQKHAFQLFEKATKAYKNKDKQKLEKVVEELKELLERILSGGASPAAPAGGDKENVLQKIYEIMKELERLGHAEASMQVSDLIYEFMKTKDENLLEEAERLLEEVKR

SEQ ID NO: 304 - protein, 196 aa, Artificial Sequence
  Synthetic
MEKKISAWSHPQFEKGGGSGGGSGGSAWSHPQFEKGGSGSSGELEEQVMHVLDQVSELAHELLHKLTGEELERAAYFNWWATEMMLELIKSDDEREIREIEEEARRILEHLEELARKGGGGELEEQVMHVLDQVSELAHELLHKLTGEELERAAYFNWWATEMMLELIKSDDEREIREIEEEARRILEHLEELARK

SEQ ID NO: 305 - protein, 194 aa, Artificial Sequence
  Synthetic
MEKKISAWSHPQFEKGGGSGGGSGGSAWSHPQFEKGGSGSSGELEEQVMHVLDQVSELAHELLHKLTGEELERAAYFNWWATEMMLELIKSDDEREIREIEEEARRILEHLEELARKGGELEEQVMHVLDQVSELAHELLHKLTGEELERAAYFNWWATEMMLELIKSDDEREIREIEEEARRILEHLEELARK

SEQ ID NO: 306 - protein, 205 aa, Artificial Sequence
  Synthetic
MEKKISAWSHPQFEKGGGSGGGSGGSAWSHPQFEKGGSGSSGELEEQVMHVLDQVSELAHELLHKLTGEELERAAYFNWWATEMMLELIKSDDEREIREIEEEARRILEHLEELARKGGASPAAPAPASPAAPAPSAPAGGNIDELLMQVTDLIYEALHFAKDEEFQKHAFQLFEKATKAYKNKDKQKLEKVVEELKELLERILS

SEQ ID NO: 307 - protein, 197 aa, Artificial Sequence
  Synthetic
MEKKISAWSHPQFEKGGGSGGGSGGSAWSHPQFEKGGSGSSGELEEQVMHVLDQVSELAHELLHKLTGEELERAAYFNWWATEMMLELIKSDDEREIREIEEEARRILEHLEELARKGGASPAAPAPASPAGGNIDELLMQVTDLIYEALHFAKDEEFQKHAFQLFEKATKAYKNKDKQKLEKVVEELKELLERILS

SEQ ID NO: 308 - protein, 192 aa, Artificial Sequence
  Synthetic
MEKKISAWSHPQFEKGGGSGGGSGGSAWSHPQFEKGGSGSSGELEEQVMHVLDQVSELAHELLHKLTGEELERAAYFNWWATEMMLELIKSDDEREIREIEEEARRILEHLEELARKGGASPAAPAGGNIDELLMQVTDLIYEALHFAKDEEFQKHAFQLFEKATKAYKNKDKQKLEKVVEELKELLERILS

SEQ ID NO: 309 - protein, 277 aa, Artificial Sequence
  Synthetic
MEKKISAWSHPQFEKGGGSGGGSGGSAWSHPQFEKGGSGSSGDKENVLQKIYEIMKELERLGHAEASMQVSDLIYEFMKTKDENLLEEAERLLEEVKRGGASPAAPAPASPAAPAPSAPAGGELEEQVMHVLDQVSELAHELLHKLTGEELERAAYFNWWATEMMLELIKSDDEREIREIEEEARRILEHLEELARKGGASPAAPAPASPAAPAPSAPAGGDKENVLQKIYEIMKELERLGHAEASMQVSDLIYEFMKTKDENLLEEAERLLEEVKR

SEQ ID NO: 310 - protein, 285 aa, Artificial Sequence
  Synthetic
MEKKISAWSHPQFEKGGGSGGGSGGSAWSHPQFEKGGSGSSGELEEQVMHVLDQVSELAHELLHKLTGEELERAAYFNWWATEMMLELIKSDDEREIREIEEEARRILEHLEELARKGGASPAAPAPASPAAPAPSAPAGGNLDELHMQMTDLVYEALHFAKDEEFQKHVFQLFEKATKAYKNKDRQKLEKVVEELKELLERLLSGGASPAAPAPASPAAPAPSAPAGGDKENVLQKIYEIMKELERLGHAEASMQVSDLIYEFMKTKDENLLEEAERLLEEVKR

SEQ ID NO: 311 - protein, 277 aa, Artificial Sequence
  Synthetic
MEKKISAWSHPQFEKGGGSGGGSGGSAWSHPQFEKGGSGSSGELEEQVMHVLDQVSELAHELLHKLTGEELERAAYFNWWATEMMLELIKSDDEREIREIEEEARRILEHLEELARKGGASPAAPAPASPAAPAPSAPAGGNLDELHMQMTDLVYEALHFAKDEEFQKHVFQLFEKATKAYKNKDRQKLEKVVEELKELLERLLSGGASPAAPAPASPAGGDKENVLQKIYEIMKELERLGHAEASMQVSDLIYEFMKTKDENLLEEAERLLEEVKR

SEQ ID NO: 312 - protein, 277 aa, Artificial Sequence
  Synthetic
MEKKISAWSHPQFEKGGGSGGGSGGSAWSHPQFEKGGSGSSGELEEQVMHVLDQVSELAHELLHKLTGEELERAAYFNWWATEMMLELIKSDDEREIREIEEEARRILEHLEELARKGGASPAAPAPASPAGGNLDELHMQMTDLVYEALHFAKDEEFQKHVFQLFEKATKAYKNKDRQKLEKVVEELKELLERLLSGGASPAAPAPASPAAPAPSAPAGGDKENVLQKIYEIMKELERLGHAEASMQVSDLIYEFMKTKDENLLEEAERLLEEVKR

SEQ ID NO: 313 - protein, 269 aa, Artificial Sequence
  Synthetic
MEKKISAWSHPQFEKGGGSGGGSGGSAWSHPQFEKGGSGSSGELEEQVMHVLDQVSELAHELLHKLTGEELERAAYFNWWATEMMLELIKSDDEREIREIEEEARRILEHLEELARKGGASPAAPAPASPAGGNLDELHMQMTDLVYEALHFAKDEEFQKHVFQLFEKATKAYKNKDRQKLEKVVEELKELLERLLSGGASPAAPAPASPAGGDKENVLQKIYEIMKELERLGHAEASMQVSDLIYEFMKTKDENLLEEAERLLEEVKR

SEQ ID NO: 314 - protein, 264 aa, Artificial Sequence
  Synthetic
MEKKISAWSHPQFEKGGGSGGGSGGSAWSHPQFEKGGSGSSGELEEQVMHVLDQVSELAHELLHKLTGEELERAAYFNWWATEMMLELIKSDDEREIREIEEEARRILEHLEELARKGGASPAAPAGGNLDELHMQMTDLVYEALHFAKDEEFQKHVFQLFEKATKAYKNKDRQKLEKVVEELKELLERLLSGGASPAAPAPASPAGGDKENVLQKIYEIMKELERLGHAEASMQVSDLIYEFMKTKDENLLEEAERLLEEVKR

SEQ ID NO: 315 - protein, 272 aa, Artificial Sequence
  Synthetic
MEKKISAWSHPQFEKGGGSGGGSGGSAWSHPQFEKGGSGSSGELEEQVMHVLDQVSELAHELLHKLTGEELERAAYFNWWATEMMLELIKSDDEREIREIEEEARRILEHLEELARKGGASPAAPAPASPAAPAPSAPAGGNLDELHMQMTDLVYEALHFAKDEEFQKHVFQLFEKATKAYKNKDRQKLEKVVEELKELLERLLSGGASPAAPAGGDKENVLQKIYEIMKELERLGHAEASMQVSDLIYEFMKTKDENLLEEAERLLEEVKR

SEQ ID NO: 316 - protein, 264 aa, Artificial Sequence
  Synthetic
MEKKISAWSHPQFEKGGGSGGGSGGSAWSHPQFEKGGSGSSGELEEQVMHVLDQVSELAHELLHKLTGEELERAAYFNWWATEMMLELIKSDDEREIREIEEEARRILEHLEELARKGGASPAAPAPASPAGGNLDELHMQMTDLVYEALHFAKDEEFQKHVFQLFEKATKAYKNKDRQKLEKVVEELKELLERLLSGGASPAAPAGGDKENVLQKIYEIMKELERLGHAEASMQVSDLIYEFMKTKDENLLEEAERLLEEVKR

SEQ ID NO: 317 - protein, 259 aa, Artificial Sequence
  Synthetic
MEKKISAWSHPQFEKGGGSGGGSGGSAWSHPQFEKGGSGSSGELEEQVMHVLDQVSELAHELLHKLTGEELERAAYFNWWATEMMLELIKSDDEREIREIEEEARRILEHLEELARKGGASPAAPAGGNLDELHMQMTDLVYEALHFAKDEEFQKHVFQLFEKATKAYKNKDRQKLEKVVEELKELLERLLSGGASPAAPAGGDKENVLQKIYEIMKELERLGHAEASMQVSDLIYEFMKTKDENLLEEAERLLEEVKR

SEQ ID NO: 318 - protein, 251 aa, Artificial Sequence
  Synthetic
MEKKISAWSHPQFEKGGGSGGGSGGSAWSHPQFEKGGSGSSGELEEQVMHVLDQVSELAHELLHKLTGEELERAAYFNWWATEMMLELIKSDDEREIREIEEEARRILEHLEELARKGGASAGGNLDELHMQMTDLVYEALHFAKDEEFQKHVFQLFEKATKAYKNKDRQKLEKVVEELKELLERLLSGGASAGGDKENVLQKIYEIMKELERLGHAEASMQVSDLIYEFMKTKDENLLEEAERLLEEVKR

SEQ ID NO: 319 - protein, 253 aa, Artificial Sequence
  Synthetic
MEKKISAWSHPQFEKGGGSGGGSGGSAWSHPQFEKGGSGSSGELEEQVMHVLDQVSELAHELLHKLTGEELERAAYFNWWATEMMLELIKSDDEREIREIEEEARRILEHLEELARKGGSGGSGGNLDELHMQMTDLVYEALHFAKDEEFQKHVFQLFEKATKAYKNKDRQKLEKVVEELKELLERLLSGGSGGSGGDKENVLQKIYEIMKELERLGHAEASMQVSDLIYEFMKTKDENLLEEAERLLEEVKR

SEQ ID NO: 320 - protein, 247 aa, Artificial Sequence
  Synthetic
MEKKISAWSHPQFEKGGGSGGGSGGSAWSHPQFEKGGSGSSGELEEQVMHVLDQVSELAHELLHKLTGEELERAAYFNWWATEMMLELIKSDDEREIREIEEEARRILEHLEELARKGGSGGNLDELHMQMTDLVYEALHFAKDEEFQKHVFQLFEKATKAYKNKDRQKLEKVVEELKELLERLLSGGSGGDKENVLQKIYEIMKELERLGHAEASMQVSDLIYEFMKTKDENLLEEAERLLEEVKR

SEQ ID NO: 321 - protein, 259 aa, Artificial Sequence
  Synthetic
MEKKISAWSHPQFEKGGGSGGGSGGSAWSHPQFEKGGSGSSGELEEQVMHVLDQVSELAHELLHKLTGEELERAAYFNWWATEMMLELIKSDDEREIREIEEEARRILEHLEELARKGGSGGSGGSGGNLDELHMQMTDLVYEALHFAKDEEFQKHVFQLFEKATKAYKNKDRQKLEKVVEELKELLERLLSGGSGGSGGSGGDKENVLQKIYEIMKELERLGHAEASMQVSDLIYEFMKTKDENLLEEAERLLEEVKR

SEQ ID NO: 322 - protein, 289 aa, Artificial Sequence
  Synthetic
MEKKISAWSHPQFEKGGGSGGGSGGSAWSHPQFEKGGSGSSGELEEQVMHVLDQVSELAHELLHKLTGEELERAAYFNWWATEMMLELIKSDDEREIREIEEEARRILEHLEELARKGGASPAAPAGGELEEQVMHVLDQVSELAHELLHKLTGEELERAAYFNWWATEMMLELIKSDDEREIREIEEEARRILEHLEELARKGGASPAAPAGGELEEQVMHVLDQVSELAHELLHKLTGEELERAAYFNWWATEMMLELIKSDDEREIREIEEEARRILEHLEELARK

SEQ ID NO: 323 - protein, 289 aa, Artificial Sequence
  Synthetic
MEKKISAWSHPQFEKGGGSGGGSGGSAWSHPQFEKGGSGSSGELEEQVMHVLDQVSELAHELLHKLTGEELERAAYFNWWATEMMLELIKSDDEREIREIEEEARRILEHLEELARKGGSGGSGGSGGELEEQVMHVLDQVSELAHELLHKLTGEELERAAYFNWWATEMMLELIKSDDEREIREIEEEARRILEHLEELARKGGSGGSGGSGGELEEQVMHVLDQVSELAHELLHKLTGEELERAAYFNWWATEMMLELIKSDDEREIREIEEEARRILEHLEELARK

SEQ ID NO: 324 - protein, 283 aa, Artificial Sequence
  Synthetic
MEKKISAWSHPQFEKGGGSGGGSGGSAWSHPQFEKGGSGSSGELEEQVMHVLDQVSELAHELLHKLTGEELERAAYFNWWATEMMLELIKSDDEREIREIEEEARRILEHLEELARKGGSGGSGGELEEQVMHVLDQVSELAHELLHKLTGEELERAAYFNWWATEMMLELIKSDDEREIREIEEEARRILEHLEELARKGGSGGSGGELEEQVMHVLDQVSELAHELLHKLTGEELERAAYFNWWATEMMLELIKSDDEREIREIEEEARRILEHLEELARK

SEQ ID NO: 325 - protein, 277 aa, Artificial Sequence
  Synthetic
MEKKISAWSHPQFEKGGGSGGGSGGSAWSHPQFEKGGSGSSGELEEQVMHVLDQVSELAHELLHKLTGEELERAAYFNWWATEMMLELIKSDDEREIREIEEEARRILEHLEELARKGGSGGELEEQVMHVLDQVSELAHELLHKLTGEELERAAYFNWWATEMMLELIKSDDEREIREIEEEARRILEHLEELARKGGSGGELEEQVMHVLDQVSELAHELLHKLTGEELERAAYFNWWATEMMLELIKSDDEREIREIEEEARRILEHLEELARK

SEQ ID NO: 326 - protein, 267 aa, Artificial Sequence
  Synthetic
MEKKISAWSHPQFEKGGGSGGGSGGSAWSHPQFEKGGSGSSGELEEQVMHVLDQVSELAHELLHKLTGEELERAAYFNWWATEMMLELIKSDDEREIREIEEEARRILEHLEELARKGGSGGGGSGGGGSGGNLDELHMQMTDLVYEALHFAKDEEFQKHVFQLFEKATKAYKNKDRQKLEKVVEELKELLERLLSGGSGGGGSGGGGSGGDKENVLQKIYEIMKELERLGHAEASMQVSDLIYEFMKTKDENLLEEAERLLEEVKR

SEQ ID NO: 327 - protein, 261 aa, Artificial Sequence
  Synthetic
MEKKISAWSHPQFEKGGGSGGGSGGSAWSHPQFEKGGSGSSGELEEQVMHVLDQVSELAHELLHKLTGEELERAAYFNWWATEMMLELIKSDDEREIREIEEEARRILEHLEELARKGGSGGGGSGGGGNLDELHMQMTDLVYEALHFAKDEEFQKHVFQLFEKATKAYKNKDRQKLEKVVEELKELLERLLSGGSGGGGSGGGGDKENVLQKIYEIMKELERLGHAEASMQVSDLIYEFMKTKDENLLEEAERLLEEVKR

SEQ ID NO: 328 - protein, 255 aa, Artificial Sequence
  Synthetic
MEKKISAWSHPQFEKGGGSGGGSGGSAWSHPQFEKGGSGSSGELEEQVMHVLDQVSELAHELLHKLTGEELERAAYFNWWATEMMLELIKSDDEREIREIEEEARRILEHLEELARKGGGGSGGGGNLDELHMQMTDLVYEALHFAKDEEFQKHVFQLFEKATKAYKNKDRQKLEKVVEELKELLERLLSGGGGSGGGGDKENVLQKIYEIMKELERLGHAEASMQVSDLIYEFMKTKDENLLEEAERLLEEVKR

SEQ ID NO: 329 - protein, 251 aa, Artificial Sequence
  Synthetic
MEKKISAWSHPQFEKGGGSGGGSGGSAWSHPQFEKGGSGSSGELEEQVMHVLDQVSELAHELLHKLTGEELERAAYFNWWATEMMLELIKSDDEREIREIEEEARRILEHLEELARKGGGSGGGNLDELHMQMTDLVYEALHFAKDEEFQKHVFQLFEKATKAYKNKDRQKLEKVVEELKELLERLLSGGGSGGGDKENVLQKIYEIMKELERLGHAEASMQVSDLIYEFMKTKDENLLEEAERLLEEVKR

SEQ ID NO: 330 - protein, 182 aa, Artificial Sequence
  Synthetic
MEKKIGGGDKENVLQKIYEIMKELERLGHAEASMQVSDLIYEFMKTKDENLLEEAERLLEEVKRGGSGGGGSGGGGSGGGGSGGGGSGGDKENVLQKIYEIMKELERLGHAEASMQVSDLIYEFMKTKDENLLEEAERLLEEVKRGGGSGGGSAWSHPQFEKGGGSGGGSGGSAWSHPQFEK

SEQ ID NO: 331 - protein, 177 aa, Artificial Sequence
  Synthetic
MEKKIGGGDKENVLQKIYEIMKELERLGHAEASMQVSDLIYEFMKTKDENLLEEAERLLEEVKRGGSGGGGSGGGGSGGGGSGGDKENVLQKIYEIMKELERLGHAEASMQVSDLIYEFMKTKDENLLEEAERLLEEVKRGGGSGGGSAWSHPQFEKGGGSGGGSGGSAWSHPQFEK

SEQ ID NO: 332 - protein, 172 aa, Artificial Sequence
  Synthetic
MEKKIGGGDKENVLQKIYEIMKELERLGHAEASMQVSDLIYEFMKTKDENLLEEAERLLEEVKRGGSGGGGSGGGGSGGDKENVLQKIYEIMKELERLGHAEASMQVSDLIYEFMKTKDENLLEEAERLLEEVKRGGGSGGGSAWSHPQFEKGGGSGGGSGGSAWSHPQFEK

SEQ ID NO: 333 - protein, 167 aa, Artificial Sequence
  Synthetic
MEKKIGGGDKENVLQKIYEIMKELERLGHAEASMQVSDLIYEFMKTKDENLLEEAERLLEEVKRGGSGGGGSGGDKENVLQKIYEIMKELERLGHAEASMQVSDLIYEFMKTKDENLLEEAERLLEEVKRGGGSGGGSAWSHPQFEKGGGSGGGSGGSAWSHPQFEK

SEQ ID NO: 334 - protein, 186 aa, Artificial Sequence
  Synthetic
MEKKIGGGELEEQVMHVLDQVSELAHELLHKLTGEELERAAYFNWWATEMMLELIKSDDEREIREIEEEARRILEHLEELARKGGSGGGGSGGDKENVLQKIYEIMKELERLGHAEASMQVSDLIYEFMKTKDENLLEEAERLLEEVKRGGGSGGGSAWSHPQFEKGGGSGGGSGGSAWSHPQFEK

SEQ ID NO: 335 - protein, 175 aa, Artificial Sequence
  Synthetic
MEKKIGGGNLDELHMQMTDLVYEALHFAKDEEFQKHVFQLFEKATKAYKNKDRQKLEKVVEELKELLERLLSGGSGGGGSGGDKENVLQKIYEIMKELERLGHAEASMQVSDLIYEFMKTKDENLLEEAERLLEEVKRGGGSGGGSAWSHPQFEKGGGSGGGSGGSAWSHPQFEK

SEQ ID NO: 336 - protein, 194 aa, Artificial Sequence
  Synthetic
MEKKIGGGELEEQVMHVLDQVSELAHELLHKLTGEELERAAYFNWWATEMMLELIKSDDEREIREIEEEARRILEHLEELARKGGSGGGGSGGNLDELHMQMTDLVYEALHFAKDEEFQKHVFQLFEKATKAYKNKDRQKLEKVVEELKELLERLLSGGGSGGGSAWSHPQFEKGGGSGGGSGGSAWSHPQFEK

SEQ ID NO: 337 - protein, 194 aa, Artificial Sequence
  Synthetic
MEKKIGGGNLDELHMQMTDLVYEALHFAKDEEFQKHVFQLFEKATKAYKNKDRQKLEKVVEELKELLERLLSGGSGGGGSGGELEEQVMHVLDQVSELAHELLHKLTGEELERAAYFNWWATEMMLELIKSDDEREIREIEEEARRILEHLEELARKGGGSGGGSAWSHPQFEKGGGSGGGSGGSAWSHPQFEK

SEQ ID NO: 338 - protein, 260 aa, Artificial Sequence
  Synthetic
MEKKIGGGELEEQVMHVLDQVSELAHELLHKLTGEELERAAYFNWWATEMMLELIKSDDEREIREIEEEARRILEHLEELARKGGSGGGGSGGNLDELHMQMTDLVYEALHFAKDEEFQKHVFQLFEKATKAYKNKDRQKLEKVVEELKELLERLLSGGSGGGGSGGDKENVLQKIYEIMKELERLGHAEASMQVSDLIYEFMKTKDENLLEEAERLLEEVKRGGGSGGGSAWSHPQFEKGGGSGGGSGGSAWSHPQFEK

SEQ ID NO: 339 - protein, 260 aa, Artificial Sequence
  Synthetic
MEKKIGGGNLDELHMQMTDLVYEALHFAKDEEFQKHVFQLFEKATKAYKNKDRQKLEKVVEELKELLERLLSGGSGGGGSGGELEEQVMHVLDQVSELAHELLHKLTGEELERAAYFNWWATEMMLELIKSDDEREIREIEEEARRILEHLEELARKGGSGGGGSGGDKENVLQKIYEIMKELERLGHAEASMQVSDLIYEFMKTKDENLLEEAERLLEEVKRGGGSGGGSAWSHPQFEKGGGSGGGSGGSAWSHPQFEK

SEQ ID NO: 340 - protein, 270 aa, Artificial Sequence
  Synthetic
MEKKIGGGELEEQVMHVLDQVSELAHELLHKLTGEELERAAYFNWWATEMMLELIKSDDEREIREIEEEARRILEHLEELARKGGSGGGGSGGGGSGGNLDELHMQMTDLVYEALHFAKDEEFQKHVFQLFEKATKAYKNKDRQKLEKVVEELKELLERLLSGGSGGGGSGGGGSGGDKENVLQKIYEIMKELERLGHAEASMQVSDLIYEFMKTKDENLLEEAERLLEEVKRGGGSGGGSAWSHPQFEKGGGSGGGSGGSAWSHPQFEK

SEQ ID NO: 341 - protein, 270 aa, Artificial Sequence
  Synthetic
MEKKIGGGNLDELHMQMTDLVYEALHFAKDEEFQKHVFQLFEKATKAYKNKDRQKLEKVVEELKELLERLLSGGSGGGGSGGGGSGGELEEQVMHVLDQVSELAHELLHKLTGEELERAAYFNWWATEMMLELIKSDDEREIREIEEEARRILEHLEELARKGGSGGGGSGGGGSGGDKENVLQKIYEIMKELERLGHAEASMQVSDLIYEFMKTKDENLLEEAERLLEEVKRGGGSGGGSAWSHPQFEKGGGSGGGSGGSAWSHPQFEK

SEQ ID NO: 342 - protein, 174 aa, Artificial Sequence
  Synthetic
MEKKINLDELHMQMTDLVYEALHFAKDEEFQKHVFQLFEKATKAYKNKDRQKLEKVVEELKELLERLLSGGASPAAPAPGGDKENVLQKIYEIMKELERLGHAEASMQVSDLIYEFMKTKDENLLEEAERLLEEVKRGGSGSSGSAWSHPQFEKGGGSGGGSGGSAWSHPQFEK

SEQ ID NO: 343 - protein, 185 aa, Artificial Sequence
  Synthetic
MEKKIELEEQVMHVLDQVSELAHELLHKLTGEELERAAYFNWWATEMMLELIKSDDEREIREIEEEARRILEHLEELARKGGASPAAPAPGGDKENVLQKIYEIMKELERLGHAEASMQVSDLIYEFMKTKDENLLEEAERLLEEVKRGGSGSSGSAWSHPQFEKGGGSGGGSGGSAWSHPQFEK

SEQ ID NO: 344 - protein, 193 aa, Artificial Sequence
  Synthetic
MEKKIELEEQVMHVLDQVSELAHELLHKLTGEELERAAYFNWWATEMMLELIKSDDEREIREIEEEARRILEHLEELARKGGASPAAPAPGGNLDELHMQMTDLVYEALHFAKDEEFQKHVFQLFEKATKAYKNKDRQKLEKVVEELKELLERLLSGGSGSSGSAWSHPQFEKGGGSGGGSGGSAWSHPQFEK

SEQ ID NO: 345 - protein, 193 aa, Artificial Sequence
  Synthetic
MEKKINLDELHMQMTDLVYEALHFAKDEEFQKHVFQLFEKATKAYKNKDRQKLEKVVEELKELLERLLSGGASPAAPAPGGELEEQVMHVLDQVSELAHELLHKLTGEELERAAYFNWWATEMMLELIKSDDEREIREIEEEARRILEHLEELARKGGSGSSGSAWSHPQFEKGGGSGGGSGGSAWSHPQFEK

SEQ ID NO: 346 - protein, 261 aa, Artificial Sequence
  Synthetic
MEKKIELEEQVMHVLDQVSELAHELLHKLTGEELERAAYFNWWATEMMLELIKSDDEREIREIEEEARRILEHLEELARKGGASPAAPAPGGNLDELHMQMTDLVYEALHFAKDEEFQKHVFQLFEKATKAYKNKDRQKLEKVVEELKELLERLLSGGASPAAPAPGGDKENVLQKIYEIMKELERLGHAEASMQVSDLIYEFMKTKDENLLEEAERLLEEVKRGGSGSSGSAWSHPQFEKGGGSGGGSGGSAWSHPQFEK

SEQ ID NO: 347 - protein, 261 aa, Artificial Sequence
  Synthetic
MEKKINLDELHMQMTDLVYEALHFAKDEEFQKHVFQLFEKATKAYKNKDRQKLEKVVEELKELLERLLSGGASPAAPAPGGELEEQVMHVLDQVSELAHELLHKLTGEELERAAYFNWWATEMMLELIKSDDEREIREIEEEARRILEHLEELARKGGASPAAPAPGGDKENVLQKIYEIMKELERLGHAEASMQVSDLIYEFMKTKDENLLEEAERLLEEVKRGGSGSSGSAWSHPQFEKGGGSGGGSGGSAWSHPQFEK

SEQ ID NO: 348 - protein, 285 aa, Artificial Sequence
  Synthetic
MEKKINLDELHMQMTDLVYEALHFAKDEEFQKHVFQLFEKATKAYKNKDRQKLEKVVEELKELLERLLSGGASPAAPAPASPAAPAPSAPAGGELEEQVMHVLDQVSELAHELLHKLTGEELERAAYFNWWATEMMLELIKSDDEREIREIEEEARRILEHLEELARKGGASPAAPAPASPAAPAPSAPAGGDKENVLQKIYEIMKELERLGHAEASMQVSDLIYEFMKTKDENLLEEAERLLEEVKRGGSGSSGSAWSHPQFEKGGGSGGGSGGSAWSHPQFEK

SEQ ID NO: 349 - protein, 185 aa, Artificial Sequence
  Synthetic
MEKKIELEEQVMHVLDQVSELAHELLHKLTGEELERAAYFNWWATEMMLELIKSDDEREIREIEEEAARILEHLEELARTGGASPAAPAPGGDKENVLQKIYEIMKELERLGHAEASMQVSDLIYEFMKTKDENLLEEAERLLEEVKRGGSGSSGSAWSHPQFEKGGGSGGGSGGSAWSHPQFEK

SEQ ID NO: 350 - protein, 193 aa, Artificial Sequence
  Synthetic
MEKKIELEEQVMHVLDQVSELAHELLHKLTGEELERAAYFNWWATEMMLELIKSDDEREIREIEEEAARILEHLEELARTGGASPAAPAPGGNLDELHMQMTDLVYEALHFAKDEEFQKHVFQLFEKATKAYKNKDRQKLEKVVEELKELLERLLSGGSGSSGSAWSHPQFEKGGGSGGGSGGSAWSHPQFEK

SEQ ID NO: 351 - protein, 193 aa, Artificial Sequence
  Synthetic
MEKKINLDELHMQMTDLVYEALHFAKDEEFQKHVFQLFEKATKAYKNKDRQKLEKVVEELKELLERLLSGGASPAAPAPGGELEEQVMHVLDQVSELAHELLHKLTGEELERAAYFNWWATEMMLELIKSDDEREIREIEEEAARILEHLEELARTGGSGSSGSAWSHPQFEKGGGSGGGSGGSAWSHPQFEK

SEQ ID NO: 352 - protein, 261 aa, Artificial Sequence
  Synthetic
MEKKIELEEQVMHVLDQVSELAHELLHKLTGEELERAAYFNWWATEMMLELIKSDDEREIREIEEEAARILEHLEELARTGGASPAAPAPGGNLDELHMQMTDLVYEALHFAKDEEFQKHVFQLFEKATKAYKNKDRQKLEKVVEELKELLERLLSGGASPAAPAPGGDKENVLQKIYEIMKELERLGHAEASMQVSDLIYEFMKTKDENLLEEAERLLEEVKRGGSGSSGSAWSHPQFEKGGGSGGGSGGSAWSHPQFEK

SEQ ID NO: 353 - protein, 261 aa, Artificial Sequence
  Synthetic
MEKKINLDELHMQMTDLVYEALHFAKDEEFQKHVFQLFEKATKAYKNKDRQKLEKVVEELKELLERLLSGGASPAAPAPGGELEEQVMHVLDQVSELAHELLHKLTGEELERAAYFNWWATEMMLELIKSDDEREIREIEEEAARILEHLEELARTGGASPAAPAPGGDKENVLQKIYEIMKELERLGHAEASMQVSDLIYEFMKTKDENLLEEAERLLEEVKRGGSGSSGSAWSHPQFEKGGGSGGGSGGSAWSHPQFEK

SEQ ID NO: 354 - protein, 285 aa, Artificial Sequence
  Synthetic
MEKKISAWSHPQFEKGGGSGGGSGGSAWSHPQFEKGGSGSSGELEEQVMHVLDQVSELAHELLHKLTGEELERAAYFNWWATEMMLELIKSDDEREIREIEEEAARILEHLEELARTGGASPAAPAPASPAAPAPSAPAGGNLDELHMQMTDLVYEALHFAKDEEFQKHVFQLFEKATKAYKNKDRQKLEKVVEELKELLERLLSGGASPAAPAPASPAAPAPSAPAGGDKENVLQKIYEIMKELERLGHAEASMQVSDLIYEFMKTKDENLLEEAERLLEEVKR

SEQ ID NO: 355 - protein, 285 aa, Artificial Sequence
  Synthetic
MEKKINLDELHMQMTDLVYEALHFAKDEEFQKHVFQLFEKATKAYKNKDRQKLEKVVEELKELLERLLSGGASPAAPAPASPAAPAPSAPAGGELEEQVMHVLDQVSELAHELLHKLTGEELERAAYFNWWATEMMLELIKSDDEREIREIEEEAARILEHLEELARTGGASPAAPAPASPAAPAPSAPAGGDKENVLQKIYEIMKELERLGHAEASMQVSDLIYEFMKTKDENLLEEAERLLEEVKRGGSGSSGSAWSHPQFEKGGGSGGGSGGSAWSHPQFEK

SEQ ID NO: 356 - protein, 150 aa, Artificial Sequence
  Synthetic
MEKKIELEEQVMHVLDQVSELAHELLHKLTGEELERAAYFNWWATEMMLELIKSDDEREIREIEEEARRILEHLEELARKGSGSGSGYIPEAPRDGQAYVRKDGEWVLLSTFLGGSGSSGSAWSHPQFEKGGGSGGGSGGSAWSHPQFEK

SEQ ID NO: 357 - protein, 253 aa, Artificial Sequence
  Synthetic
MEKKIELEEQVMHVLDQVSELAHELLHKLTGEELERAAYFNWWATEMMLELIKSDDEREIREIEEEARRILEHLEELARKGSGSGSGSGSGSGSGSGSGSGSGSGSGSELEEQVMHVLDQVSELAHELLHKLTGEELERAAYFNWWATEMMLELIKSDDEREIREIEEEARRILEHLEELARKGSGSGSGYIPEAPRDGQAYVRKDGEWVLLSTFLGGSGSSGSAWSHPQFEKGGGSGGGSGGSAWSHPQFEK

SEQ ID NO: 358 - protein, 149 aa, Artificial Sequence
  Synthetic
MEKKIELEEQVMHVLDQVSELAHELLHKLTGEELERAAYFNWWATEMMLELIKSDDEREIREIEEEARRILEHLEELARKGSGSGGYIPEAPRDGQAYVRKDGEWVLLSTFLGGSGSSGSAWSHPQFEKGGGSGGGSGGSAWSHPQFEK

SEQ ID NO: 359 - protein, 148 aa, Artificial Sequence
  Synthetic
MEKKIELEEQVMHVLDQVSELAHELLHKLTGEELERAAYFNWWATEMMLELIKSDDEREIREIEEEARRILEHLEELARKGSGSGYIPEAPRDGQAYVRKDGEWVLLSTFLGGSGSSGSAWSHPQFEKGGGSGGGSGGSAWSHPQFEK

SEQ ID NO: 360 - protein, 147 aa, Artificial Sequence
  Synthetic
MEKKIELEEQVMHVLDQVSELAHELLHKLTGEELERAAYFNWWATEMMLELIKSDDEREIREIEEEARRILEHLEELARKGSGGYIPEAPRDGQAYVRKDGEWVLLSTFLGGSGSSGSAWSHPQFEKGGGSGGGSGGSAWSHPQFEK

SEQ ID NO: 361 - protein, 250 aa, Artificial Sequence
  Synthetic
MEKKIELEEQVMHVLDQVSELAHELLHKLTGEELERAAYFNWWATEMMLELIKSDDEREIREIEEEARRILEHLEELARKGSGSGSGSGSGSGSGSGSGSGSGSGSGSELEEQVMHVLDQVSELAHELLHKLTGEELERAAYFNWWATEMMLELIKSDDEREIREIEEEARRILEHLEELARKGSGGYIPEAPRDGQAYVRKDGEWVLLSTFLGGSGSSGSAWSHPQFEKGGGSGGGSGGSAWSHPQFEK

SEQ ID NO: 362 - protein, 206 aa, Artificial Sequence
  Synthetic
MEKKIELEEQVMHVLDQVSELAHELLHKLTGEELERAAYFNWWATEMMLELIKSDDEREIREIEEEARRILEHLEELARKGSGSSEELRAVADLQRLNIELARKLLEAVARLQELNIDLVRKTSELTDEKTIREEIRKVKEESKRIVEEAEEEIRRAKEESRKIADESRGGSGSSGSAWSHPQFEKGGGSGGGSGGSAWSHPQFEK

SEQ ID NO: 363 - protein, 207 aa, Artificial Sequence
  Synthetic
MEKKIELEEQVMHVLDQVSELAHELLHKLTGEELERAAYFNWWATEMMLELIKSDDEREIREIEEEARRILEHLEELARKGSGSGSEELRAVADLQRLNIELARKLLEAVARLQELNIDLVRKTSELTDEKTIREEIRKVKEESKRIVEEAEEEIRRAKEESRKIADESRGGSGSSGSAWSHPQFEKGGGSGGGSGGSAWSHPQFEK

SEQ ID NO: 364 - protein, 309 aa, Artificial Sequence
  Synthetic
MEKKIELEEQVMHVLDQVSELAHELLHKLTGEELERAAYFNWWATEMMLELIKSDDEREIREIEEEARRILEHLEELARKGSGSGSGSGSGSGSGSGSGSGSGSGSGSELEEQVMHVLDQVSELAHELLHKLTGEELERAAYFNWWATEMMLELIKSDDEREIREIEEEARRILEHLEELARKGSGSSEELRAVADLQRLNIELARKLLEAVARLQELNIDLVRKTSELTDEKTIREEIRKVKEESKRIVEEAEEEIRRAKEESRKIADESRGGSGSSGSAWSHPQFEKGGGSGGGSGGSAWSHPQFEK

SEQ ID NO: 365 - protein, 310 aa, Artificial Sequence
  Synthetic
MEKKIELEEQVMHVLDQVSELAHELLHKLTGEELERAAYFNWWATEMMLELIKSDDEREIREIEEEARRILEHLEELARKGSGSGSGSGSGSGSGSGSGSGSGSGSGSELEEQVMHVLDQVSELAHELLHKLTGEELERAAYFNWWATEMMLELIKSDDEREIREIEEEARRILEHLEELARKGSGSGSEELRAVADLQRLNIELARKLLEAVARLQELNIDLVRKTSELTDEKTIREEIRKVKEESKRIVEEAEEEIRRAKEESRKIADESRGGSGSSGSAWSHPQFEKGGGSGGGSGGSAWSHPQFEK

SEQ ID NO: 366 - protein, 139 aa, Artificial Sequence
  Synthetic
MEKKINLDELHMQMTDLVYEALHFAKDEEFQKHVFQLFEKATKAYKNKDRQKLEKVVEELKELLERLLSGSGSGSGYIPEAPRDGQAYVRKDGEWVLLSTFLGGSGSSGSAWSHPQFEKGGGSGGGSGGSAWSHPQFEK

SEQ ID NO: 367 - protein, 138 aa, Artificial Sequence
  Synthetic
MEKKINLDELHMQMTDLVYEALHFAKDEEFQKHVFQLFEKATKAYKNKDRQKLEKVVEELKELLERLLSGSGSGGYIPEAPRDGQAYVRKDGEWVLLSTFLGGSGSSGSAWSHPQFEKGGGSGGGSGGSAWSHPQFEK

SEQ ID NO: 368 - protein, 137 aa, Artificial Sequence
  Synthetic
MEKKINLDELHMQMTDLVYEALHFAKDEEFQKHVFQLFEKATKAYKNKDRQKLEKVVEELKELLERLLSGSGSGYIPEAPRDGQAYVRKDGEWVLLSTFLGGSGSSGSAWSHPQFEKGGGSGGGSGGSAWSHPQFEK

SEQ ID NO: 369 - protein, 196 aa, Artificial Sequence
  Synthetic
MEKKINLDELHMQMTDLVYEALHFAKDEEFQKHVFQLFEKATKAYKNKDRQKLEKVVEELKELLERLLSGSGSGSEELRAVADLQRLNIELARKLLEAVARLQELNIDLVRKTSELTDEKTIREEIRKVKEESKRIVEEAEEEIRRAKEESRKIADESRGGSGSSGSAWSHPQFEKGGGSGGGSGGSAWSHPQFEK

SEQ ID NO: 370 - protein, 287 aa, Artificial Sequence
  Synthetic
MEKKINLDELHMQMTDLVYEALHFAKDEEFQKHVFQLFEKATKAYKNKDRQKLEKVVEELKELLERLLSGSGSGSGSGSGSGSGSGSGSGSGSGSGSNLDELHMQMTDLVYEALHFAKDEEFQKHVFQLFEKATKAYKNKDRQKLEKVVEELKELLERLLSGSGSSEELRAVADLQRLNIELARKLLEAVARLQELNIDLVRKTSELTDEKTIREEIRKVKEESKRIVEEAEEEIRRAKEESRKIADESRGGSGSSGSAWSHPQFEKGGGSGGGSGGSAWSHPQFEK

SEQ ID NO: 371 - protein, 288 aa, Artificial Sequence
  Synthetic
MEKKINLDELHMQMTDLVYEALHFAKDEEFQKHVFQLFEKATKAYKNKDRQKLEKVVEELKELLERLLSGSGSGSGSGSGSGSGSGSGSGSGSGSGSNLDELHMQMTDLVYEALHFAKDEEFQKHVFQLFEKATKAYKNKDRQKLEKVVEELKELLERLLSGSGSGSEELRAVADLQRLNIELARKLLEAVARLQELNIDLVRKTSELTDEKTIREEIRKVKEESKRIVEEAEEEIRRAKEESRKIADESRGGSGSSGSAWSHPQFEKGGGSGGGSGGSAWSHPQFEK

SEQ ID NO: 372 - protein, 238 aa, Artificial Sequence
  Synthetic
MEKKIEEAELAYLLGELAYKLGEYRIAIRAYRIALKRDPNNAEAWYNLGNAYYKQGDYDEAIEYYQKALELDPNNAEAWYNLGNAYYKQGDYDEAIEYYQKALELDPNNAEAWYNLGNAYYKQGDYDEAIEYYQKALELGSGSGSDKENVLQKIYEIMKELERLGHAEASMQVSDLIYEFMKTKDENLLEEAERLLEEVKRGGSGSSGSAWSHPQFEKGGGSGGGSGGSAWSHPQFEK

SEQ ID NO: 373 - protein, 236 aa, Artificial Sequence
  Synthetic
MEKKIEEAELAYLLGELAYKLGEYRIAIRAYRIALKRDPNNAEAWYNLGNAYYKQGDYDEAIEYYQKALELDPNNAEAWYNLGNAYYKQGDYDEAIEYYQKALELDPNNAEAWYNLGNAYYKQGDYDEAIEYYQKALELGSGSDKENVLQKIYEIMKELERLGHAEASMQVSDLIYEFMKTKDENLLEEAERLLEEVKRGGSGSSGSAWSHPQFEKGGGSGGGSGGSAWSHPQFEK

SEQ ID NO: 374 - protein, 234 aa, Artificial Sequence
  Synthetic
MEKKIEEAELAYLLGELAYKLGEYRIAIRAYRIALKRDPNNAEAWYNLGNAYYKQGDYDEAIEYYQKALELDPNNAEAWYNLGNAYYKQGDYDEAIEYYQKALELDPNNAEAWYNLGNAYYKQGDYDEAIEYYQKALELGSDKENVLQKIYEIMKELERLGHAEASMQVSDLIYEFMKTKDENLLEEAERLLEEVKRGGSGSSGSAWSHPQFEKGGGSGGGSGGSAWSHPQFEK

SEQ ID NO: 375 - protein, 283 aa, Artificial Sequence
  Synthetic
MEKKINLDELHMQMTDLVYEALHFAKDEEFQKHVFQLFEKATKAYKNKDRQKLEKVVEELKELLERLLSGGASPAAPAPASPAAPAPSAPAGGNLDELHMQMTDLVYEALHFAKDEEFQKHVFQLFEKATKAYKNKDRQKLEKVVEELKELLERLLSGSGSSEELRAVADLQRLNIELARKLLEAVARLQELNIDLVRKTSELTDEKTIREEIRKVKEESKRIVEEAEEEIRRAKEESRKIADESRGGSGSSGSAWSHPQFEKGGGSGGGSGGSAWSHPQFEK

SEQ ID NO: 376 - protein, 284 aa, Artificial Sequence
  Synthetic
MEKKINLDELHMQMTDLVYEALHFAKDEEFQKHVFQLFEKATKAYKNKDRQKLEKVVEELKELLERLLSGGASPAAPAPASPAAPAPSAPAGGNLDELHMQMTDLVYEALHFAKDEEFQKHVFQLFEKATKAYKNKDRQKLEKVVEELKELLERLLSGSGSGSEELRAVADLQRLNIELARKLLEAVARLQELNIDLVRKTSELTDEKTIREEIRKVKEESKRIVEEAEEEIRRAKEESRKIADESRGGSGSSGSAWSHPQFEKGGGSGGGSGGSAWSHPQFEK

SEQ ID NO: 377 - protein, 214 aa, Artificial Sequence
  Synthetic
MEKKIDKENVLQKIYEIMKELERLGHAEASMQVSDLIYEFMKTKDENLLEEAERLLEEVKRGGGSGGGSGGELEEQVMHVLDQVSELAHELLHKLTGEELERAAYFNWWATEMMLELIKSDDEREIREIEEEARRILEHLEELARKGSGSGYIPEAPRDGQAYVRKDGEWVLLSTFLGGSGSSGSAWSHPQFEKGGGSGGGSGGSAWSHPQFEK

SEQ ID NO: 378 - protein, 232 aa, Artificial Sequence
  Synthetic
MEKKIDKENVLQKIYEIMKELERLGHAEASMQVSDLIYEFMKTKDENLLEEAERLLEEVKRGSGSGSGSGSGSGSGSGSGSGSGSGSGSELEEQVMHVLDQVSELAHELLHKLTGEELERAAYFNWWATEMMLELIKSDDEREIREIEEEARRILEHLEELARKGSGSGYIPEAPRDGQAYVRKDGEWVLLSTFLGGSGSSGSAWSHPQFEKGGGSGGGSGGSAWSHPQFEK

SEQ ID NO: 379 - protein, 222 aa, Artificial Sequence
  Synthetic
MEKKINLDELHMQMTDLVYEALHFAKDEEFQKHVFQLFEKATKAYKNKDRQKLEKVVEELKELLERLLSGGGSGGGSGGELEEQVMHVLDQVSELAHELLHKLTGEELERAAYFNWWATEMMLELIKSDDEREIREIEEEARRILEHLEELARKGSGSGYIPEAPRDGQAYVRKDGEWVLLSTFLGGSGSSGSAWSHPQFEKGGGSGGGSGGSAWSHPQFEK

SEQ ID NO: 380 - protein, 228 aa, Artificial Sequence
  Synthetic
MEKKINLDELHMQMTDLVYEALHFAKDEEFQKHVFQLFEKATKAYKNKDRQKLEKVVEELKELLERLLSGSGSGSGSGSGSGSGSELEEQVMHVLDQVSELAHELLHKLTGEELERAAYFNWWATEMMLELIKSDDEREIREIEEEARRILEHLEELARKGSGSGYIPEAPRDGQAYVRKDGEWVLLSTFLGGSGSSGSAWSHPQFEKGGGSGGGSGGSAWSHPQFEK

SEQ ID NO: 381 - protein, 331 aa, Artificial Sequence
  Synthetic
MEKKISAWSHPQFEKGGGSGGGSGGSAWSHPQFEKGGSGSSGMEEAELAYLLGELAYKLGEYRIAIRAYRIALKRDPNNAEAWYNLGNAYYKQGDYDEAIEYYQKALELDPNNAEAWYNLGNAYYKQGDYDEAIEYYQKALELDPNNAEAWYNLGNAYYKQGDYDEAIEYYQKALELGSGSGSDKENVLQKIYEIMKELERLGHAEASMQVSDLIYEFMKTKDENLLEEAERLLEEVKRGSGSGSGSGSGSGSGSGSGSGSGSGSGSNLDELHMQMTDLVYEALHFAKDEEFQKHVFQLFEKATKAYKNKDRQKLEKVVEELKELLERLLS

SEQ ID NO: 382 - protein, 312 aa, Artificial Sequence
  Synthetic
MEKKISAWSHPQFEKGGGSGGGSGGSAWSHPQFEKGGSGSSGMEEAELAYLLGELAYKLGEYRIAIRAYRIALKRDPNNAEAWYNLGNAYYKQGDYDEAIEYYQKALELDPNNAEAWYNLGNAYYKQGDYDEAIEYYQKALELDPNNAEAWYNLGNAYYKQGDYDEAIEYYQKALELGSGSGSDKENVLQKIYEIMKELERLGHAEASMQVSDLIYEFMKTKDENLLEEAERLLEEVKRGSGSGSGSGNLDELHMQMTDLVYEALHFAKDEEFQKHVFQLFEKATKAYKNKDRQKLEKVVEELKELLERLLS

SEQ ID NO: 383 - protein, 342 aa, Artificial Sequence
  Synthetic
MEKKISAWSHPQFEKGGGSGGGSGGSAWSHPQFEKGGSGSSGMEEAELAYLLGELAYKLGEYRIAIRAYRIALKRDPNNAEAWYNLGNAYYKQGDYDEAIEYYQKALELDPNNAEAWYNLGNAYYKQGDYDEAIEYYQKALELDPNNAEAWYNLGNAYYKQGDYDEAIEYYQKALELGSGSGSDKENVLQKIYEIMKELERLGHAEASMQVSDLIYEFMKTKDENLLEEAERLLEEVKRGSGSGSGSGSGSGSGSGSGSGSGSGSGSELEEQVMHVLDQVSELAHELLHKLTGEELERAAYFNWWATEMMLELIKSDDEREIREIEEEARRILEHLEELARK

SEQ ID NO: 384 - protein, 323 aa, Artificial Sequence
  Synthetic
MEKKISAWSHPQFEKGGGSGGGSGGSAWSHPQFEKGGSGSSGMEEAELAYLLGELAYKLGEYRIAIRAYRIALKRDPNNAEAWYNLGNAYYKQGDYDEAIEYYQKALELDPNNAEAWYNLGNAYYKQGDYDEAIEYYQKALELDPNNAEAWYNLGNAYYKQGDYDEAIEYYQKALELGSGSGSDKENVLQKIYEIMKELERLGHAEASMQVSDLIYEFMKTKDENLLEEAERLLEEVKRGSGSGSGSGELEEQVMHVLDQVSELAHELLHKLTGEELERAAYFNWWATEMMLELIKSDDEREIREIEEEARRILEHLEELARK

SEQ ID NO: 385 - protein, 203 aa, Artificial Sequence
  Synthetic
MEKKIDKENVLQKIYEIMKELERLGHAEASMQVSDLIYEFMKTKDENLLEEAERLLEEVKRGGGSGGGSGGNLDELHMQMTDLVYEALHFAKDEEFQKHVFQLFEKATKAYKNKDRQKLEKVVEELKELLERLLSGSGSGYIPEAPRDGQAYVRKDGEWVLLSTFLGGSGSSGSAWSHPQFEKGGGSGGGSGGSAWSHPQFEK

SEQ ID NO: 386 - protein, 221 aa, Artificial Sequence
  Synthetic
MEKKIDKENVLQKIYEIMKELERLGHAEASMQVSDLIYEFMKTKDENLLEEAERLLEEVKRGSGSGSGSGSGSGSGSGSGSGSGSGSGSNLDELHMQMTDLVYEALHFAKDEEFQKHVFQLFEKATKAYKNKDRQKLEKVVEELKELLERLLSGSGSGYIPEAPRDGQAYVRKDGEWVLLSTFLGGSGSSGSAWSHPQFEKGGGSGGGSGGSAWSHPQFEK

SEQ ID NO: 387 - protein, 222 aa, Artificial Sequence
  Synthetic
MEKKIELEEQVMHVLDQVSELAHELLHKLTGEELERAAYFNWWATEMMLELIKSDDEREIREIEEEARRILEHLEELARKGGGSGGGSGGNLDELHMQMTDLVYEALHFAKDEEFQKHVFQLFEKATKAYKNKDRQKLEKVVEELKELLERLLSGSGSGYIPEAPRDGQAYVRKDGEWVLLSTFLGGSGSSGSAWSHPQFEKGGGSGGGSGGSAWSHPQFEK

SEQ ID NO: 388 - protein, 228 aa, Artificial Sequence
  Synthetic
MEKKIELEEQVMHVLDQVSELAHELLHKLTGEELERAAYFNWWATEMMLELIKSDDEREIREIEEEARRILEHLEELARKGSGSGSGSGSGSGSGSNLDELHMQMTDLVYEALHFAKDEEFQKHVFQLFEKATKAYKNKDRQKLEKVVEELKELLERLLSGSGSGYIPEAPRDGQAYVRKDGEWVLLSTFLGGSGSSGSAWSHPQFEKGGGSGGGSGGSAWSHPQFEK

SEQ ID NO: 389 - protein, 261 aa, Artificial Sequence
  Synthetic
MEKKIDKENVLQKIYEIMKELERLGHAEASMQVSDLIYEFMKTKDENLLEEAERLLEEVKRGSGSGSGSGNLDELHMQMTDLVYEALHFAKDEEFQKHVFQLFEKATKAYKNKDRQKLEKVVEELKELLERLLSGSGSGSEELRAVADLQRLNIELARKLLEAVARLQELNIDLVRKTSELTDEKTIREEIRKVKEESKRIVEEAEEEIRRAKEESRKIADESRGGSGSSGSAWSHPQFEKGGGSGGGSGGSAWSHPQFEK

SEQ ID NO: 390 - protein, 280 aa, Artificial Sequence
  Synthetic
MEKKIELEEQVMHVLDQVSELAHELLHKLTGEELERAAYFNWWATEMMLELIKSDDEREIREIEEEARRILEHLEELARKGSGSGSGSGNLDELHMQMTDLVYEALHFAKDEEFQKHVFQLFEKATKAYKNKDRQKLEKVVEELKELLERLLSGSGSGSEELRAVADLQRLNIELARKLLEAVARLQELNIDLVRKTSELTDEKTIREEIRKVKEESKRIVEEAEEEIRRAKEESRKIADESRGGSGSSGSAWSHPQFEKGGGSGGGSGGSAWSHPQFEK

SEQ ID NO: 391 - protein, 205 aa, Artificial Sequence
  Synthetic
MEKKIELEEQVMHVLDQVSELAHELLHKLTGEELERAAYFNWWATEMMLELIKSDDEREIREIEEEARRILEHLEELARKGSGSEEAELAYLLGELAYKLGEYRIAIRAYRIALKRDPNNAEAWYNLGNAYYKQGDYDEAIYYQKALELDPNNAEAKQNLGNAKQKQGGGSGSSGSAWSHPQFEKGGGSGGGSGGSAWSHPQFEK

SEQ ID NO: 392 - protein, 207 aa, Artificial Sequence
  Synthetic
MEKKIELEEQVMHVLDQVSELAHELLHKLTGEELERAAYFNWWATEMMLELIKSDDEREIREIEEEARRILEHLEELARKGSGSGSEEAELAYLLGELAYKLGEYRIAIRAYRIALKRDPNNAEAWYNLGNAYYKQGDYDEIEYYQKALELDPNNAEAKQNLGNAKQKQGGGSGSSGSAWSHPQFEKGGGSGGGSGGSAWSHPQFEK

SEQ ID NO: 393 - protein, 238 aa, Artificial Sequence
  Synthetic
MEKKIELEEQVMHVLDQVSELAHELLHKLTGEELERAAYFNWWATEMMLELIKSDDEREIREIEEEARRILEHLEELARKGSGSEEAELAYLLGELAYKLGEYRIAIRAYRIALKRDPNNAEAWYNLGNAYYKQGDYDEAIYYQKALELDPNNAEAWYNLGNAYYKQGDYDEAIEYYQKALELDPNNAEAKQNLGNKQKQGGGSGSSGSAWSHPQFEKGGGSGGGSGGSAWSHPQFEK

SEQ ID NO: 394 - protein, 240 aa, Artificial Sequence
  Synthetic
MEKKIELEEQVMHVLDQVSELAHELLHKLTGEELERAAYFNWWATEMMLELIKSDDEREIREIEEEARRILEHLEELARKGSGSGSEEAELAYLLGELAYKLGEYRIAIRAYRIALKRDPNNAEAWYNLGNAYYKQGDYDEAIYYQKALELDPNNAEAWYNLGNAYYKQGDYDEAIEYYQKALELDPNNAEAKQNLGNKQKQGGGSGSSGSAWSHPQFEKGGGSGGGSGGSAWSHPQFEK

SEQ ID NO: 395 - protein, 196 aa, Artificial Sequence
  Synthetic
MEKKIELEEQVMHVLDQVSELAHELLHKLTGEELERAAYFNWWATEMMLELIKSDDEREIREIEEEARRILEHLEELARKGSGSGSEYEIRKALEELKASTAELKRATASLRASTEELKKNPSEDALVENNRLIVEHNAIIVENRIIAAVLELIVRAIKGGSGSSGSAWSHPQFEKGGGSGGGSGGSAWSHPQFEK

SEQ ID NO: 396 - protein, 198 aa, Artificial Sequence
  Synthetic
MEKKIELEEQVMHVLDQVSELAHELLHKLTGEELERAAYFNWWATEMMLELIKSDDEREIREIEEEARRILEHLEELARKGSGSGSGSEYEIRKALEELKASTAELKRATASLRASTEELKKNPSEDALVENNRLIVEHNAIIVENRIIAAVLELIVRAIKGGSGSSGSAWSHPQFEKGGGSGGGSGGSAWSHPQFEK

SEQ ID NO: 397 - protein, 238 aa, Artificial Sequence
  Synthetic
MEKKISAWSHPQFEKGGGSGGGSGGSAWSHPQFEKGGSGSSGEEAELAYLLGELAYKLGEYRIAIRAYRIALKRDPNNAEAWYNLGNAYYKQGDYDEAIEYYQKALELDPNNAEAWYNLGNAYYKQGDYDEAIEYYQKALELDPNNAEAWYNLGNAYYKQGDYDEAIEYYQKALELGSGSGSDKENVLQKIYEIMKELERLGHAEASMQVSDLIYEFMKTKDENLLEEAERLLEEVKR

SEQ ID NO: 398 - protein, 236 aa, Artificial Sequence
  Synthetic
MEKKISAWSHPQFEKGGGSGGGSGGSAWSHPQFEKGGSGSSGEEAELAYLLGELAYKLGEYRIAIRAYRIALKRDPNNAEAWYNLGNAYYKQGDYDEAIEYYQKALELDPNNAEAWYNLGNAYYKQGDYDEAIEYYQKALELDPNNAEAWYNLGNAYYKQGDYDEAIEYYQKALELGSGSDKENVLQKIYEIMKELERLGHAEASMQVSDLIYEFMKTKDENLLEEAERLLEEVKR

SEQ ID NO: 399 - protein, 234 aa, Artificial Sequence
  Synthetic
MEKKISAWSHPQFEKGGGSGGGSGGSAWSHPQFEKGGSGSSGEEAELAYLLGELAYKLGEYRIAIRAYRIALKRDPNNAEAWYNLGNAYYKQGDYDEAIEYYQKALELDPNNAEAWYNLGNAYYKQGDYDEAIEYYQKALELDPNNAEAWYNLGNAYYKQGDYDEAIEYYQKALELGSDKENVLQKIYEIMKELERLGHAEASMQVSDLIYEFMKTKDENLLEEAERLLEEVKR

SEQ ID NO: 400 - protein, 210 aa, Artificial Sequence
  Synthetic
MEKKIELEEQVMHVLDQVSELAHELLHKLTGEELERAAYFNWWATEMMLELIKSDDEREIREIEEEARRILEHLEELARKGSGSGSGSEEAELAYLLGELAYKLGEYRIAIRAYRIALKRDPNNAEAWYNLGNAYYKQGDYDEAIEYYQKALELDPNNAEAKQNLGNAKQKQGGGSGSSGSAWSHPQFEKGGGSGGGSGGSAWSHPQFEK

SEQ ID NO: 401 - protein, 244 aa, Artificial Sequence
  Synthetic
MEKKIELEEQVMHVLDQVSELAHELLHKLTGEELERAAYFNWWATEMMLELIKSDDEREIREIEEEARRILEHLEELARKGSGSGSGSEEAELAYLLGELAYKLGEYRIAIRAYRIALKRDPNNAEAWYNLGNAYYKQGDYDEAIEYYQKALELDPNNAEAWYNLGNAYYKQGDYDEAIEYYQKALELDPNNAEAKQNLGNAKQKQGGGSGSSGSAWSHPQFEKGGGSGGGSGGSAWSHPQFEK

SEQ ID NO: 402 - protein, 201 aa, Artificial Sequence
  Synthetic
MEKKIELEEQVMHVLDQVSELAHELLHKLTGEELERAAYFNWWATEMMLELIKSDDEREIREIEEEARRILEHLEELARKGSGSGSGSGSEYEIRKALEELKASTAELKRATASLRASTEELKKNPSEDALVENNRLIVEHNAIIVENNRIIAAVLELIVRAIKGGSGSSGSAWSHPQFEKGGGSGGGSGGSAWSHPQFEK

SEQ ID NO: 403 - protein, 203 aa, Artificial Sequence
  Synthetic
MEKKIELEEQVMHVLDQVSELAHELLHKLTGEELERAAYFNWWATEMMLELIKSDDEREIREIEEEARRILEHLEELARKGSGSGSGSGSGSEYEIRKALEELKASTAELKRATASLRASTEELKKNPSEDALVENNRLIVEHNAIIVENNRIIAAVLELIVRAIKGGSGSSGSAWSHPQFEKGGGSGGGSGGSAWSHPQFEK

SEQ ID NO: 404 - protein, 212 aa, Artificial Sequence
  Synthetic
MEKKIELEEQVMHVLDQVSELAHELLHKLTGEELERAAYFNWWATEMMLELIKSDDEREIREIEEEARRILEHLEELARKGSGSGSGSGSEEAELAYLLGELAYKLGEYRIAIRAYRIALKRDPNNAEAWYNLGNAYYKQGDYDEAIEYYQKALELDPNNAEAKQNLGNAKQKQGGGSGSSGSAWSHPQFEKGGGSGGGSGGSAWSHPQFEK

SEQ ID NO: 405 - protein, 246 aa, Artificial Sequence
  Synthetic
MEKKIELEEQVMHVLDQVSELAHELLHKLTGEELERAAYFNWWATEMMLELIKSDDEREIREIEEEARRILEHLEELARKGSGSGSGSGSEEAELAYLLGELAYKLGEYRIAIRAYRIALKRDPNNAEAWYNLGNAYYKQGDYDEAIEYYQKALELDPNNAEAWYNLGNAYYKQGDYDEAIEYYQKALELDPNNAEAKQNLGNAKQKQGGGSGSSGSAWSHPQFEKGGGSGGGSGGSAWSHPQFEK

SEQ ID NO: 406 - protein, 154 aa, Artificial Sequence
  Synthetic
MEKKIELEEQVMHVLDQVSELAHELLHKLTGEELERAAYFNWWATEMMLELIKSDDEREIREIEEEARRILEHLEELARKGSGSRMKQIEDKIEEILSKIYHIENEIARIKKLIGERGGSGSSGSAWSHPQFEKGGGSGGGSGGSAWSHPQFEK

SEQ ID NO: 407 - protein, 158 aa, Artificial Sequence
  Synthetic
MEKKIELEEQVMHVLDQVSELAHELLHKLTGEELERAAYFNWWATEMMLELIKSDDEREIREIEEEARRILEHLEELARKGSGSGSGSRMKQIEDKIEEILSKIYHIENEIARIKKLIGERGGSGSSGSAWSHPQFEKGGGSGGGSGGSAWSHPQFEK

SEQ ID NO: 408 - protein, 197 aa, Artificial Sequence
  Synthetic
MEKKIELEEQVMHVLDQVSELAHELLHKLTGEELERAAYFNWWATEMMLELIKSDDEREIREIEEEARRILEHLEELARKGSGSGSEYEIRKALEELKASTAELKRSTASLRASTEELKKNPSEDALVENNRLIVENNAIIVENNRIIAAVLELIVRAIKGGSGSSGSAWSHPQFEKGGGSGGGSGGSAWSHPQFEK

SEQ ID NO: 409 - protein, 201 aa, Artificial Sequence
  Synthetic
MEKKIELEEQVMHVLDQVSELAHELLHKLTGEELERAAYFNWWATEMMLELIKSDDEREIREIEEEARRILEHLEELARKGSGSGSGSGSEYEIRKALEELKASTAELKRSTASLRASTEELKKNPSEDALVENNRLIVENNAIIVENNRIIAAVLELIVRAIKGGSGSSGSAWSHPQFEKGGGSGGGSGGSAWSHPQFEK

SEQ ID NO: 410 - protein, 242 aa, Artificial Sequence
  Synthetic
MEKKIELEEQVMHVLDQVSELAHELLHKLTGEELERAAYFNWWATEMMLELIKSDDEREIREIEEEARRILEHLEELARKGSGSGSNLAEKMYKAGNAMYRKGQYTIAIIAYTLALLKDPNNAEAWYNLGNAAYKKGEYDEAIEAYQKALELDPNNAEAWYNLGNAYYKQGDYDEAIEYYQKALELDPNNAEAKQNLGNAKQKQGGGSGSSGSAWSHPQFEKGGGSGGGSGGSAWSHPQFEK

SEQ ID NO: 411 - protein, 246 aa, Artificial Sequence
  Synthetic
MEKKIELEEQVMHVLDQVSELAHELLHKLTGEELERAAYFNWWATEMMLELIKSDDEREIREIEEEARRILEHLEELARKGSGSGSGSGSNLAEKMYKAGNAMYRKGQYTIAIIAYTLALLKDPNNAEAWYNLGNAAYKKGEYDEAIEAYQKALELDPNNAEAWYNLGNAYYKQGDYDEAIEYYQKALELDPNNAEAKQNLGNAKQKQGGGSGSSGSAWSHPQFEKGGGSGGGSGGSAWSHPQFEK

SEQ ID NO: 412 - protein, 153 aa, Artificial Sequence
  Synthetic
MEKKIELEEQVMHVLDQVSELAHELLHKLTGEELERAAYFNWWATEMMLELIKSDDEREIREIEEEARRILEHLEELARKGSGSGSGEIAKSLKEIAKSLKEIAWSLKEIAKSLKGGGSGSSGSAWSHPQFEKGGGSGGGSGGSAWSHPQFEK

SEQ ID NO: 413 - protein, 157 aa, Artificial Sequence
  Synthetic
MEKKIELEEQVMHVLDQVSELAHELLHKLTGEELERAAYFNWWATEMMLELIKSDDEREIREIEEEARRILEHLEELARKGSGSGSGSGSGEIAKSLKEIAKSLKEIAWSLKEIAKSLKGGGSGSSGSAWSHPQFEKGGGSGGGSGGSAWSHPQFEK

SEQ ID NO: 414 - protein, 207 aa, Artificial Sequence
  Synthetic
MEKKIELEEQVMHVLDQVSELAHELLHKLTGEELERAAYFNWWATEMMLELIKSDDEREIREIEEEARRILEHLEELARKGGSGGEEAELAYLLGELAYKLGEYRIAIRAYRIALKRDPNNAEAWYNLGNAYYKQGDYDEAIEYYQKALELDPNNAEAKQNLGNAKQKQGGGSGSSGSAWSHPQFEKGGGSGGGSGGSAWSHPQFEK

SEQ ID NO: 415 - protein, 209 aa, Artificial Sequence
  Synthetic
MEKKIELEEQVMHVLDQVSELAHELLHKLTGEELERAAYFNWWATEMMLELIKSDDEREIREIEEEARRILEHLEELARKGGGSGGGEEAELAYLLGELAYKLGEYRIAIRAYRIALKRDPNNAEAWYNLGNAYYKQGDYDEAIEYYQKALELDPNNAEAKQNLGNAKQKQGGGSGSSGSAWSHPQFEKGGGSGGGSGGSAWSHPQFEK

SEQ ID NO: 416 - protein, 211 aa, Artificial Sequence
  Synthetic
MEKKIELEEQVMHVLDQVSELAHELLHKLTGEELERAAYFNWWATEMMLELIKSDDEREIREIEEEARRILEHLEELARKGGGGSGGGGEEAELAYLLGELAYKLGEYRIAIRAYRIALKRDPNNAEAWYNLGNAYYKQGDYDEAIEYYQKALELDPNNAEAKQNLGNAKQKQGGGSGSSGSAWSHPQFEKGGGSGGGSGGSAWSHPQFEK

SEQ ID NO: 417 - protein, 241 aa, Artificial Sequence
  Synthetic
MEKKIELEEQVMHVLDQVSELAHELLHKLTGEELERAAYFNWWATEMMLELIKSDDEREIREIEEEARRILEHLEELARKGGSGGEEAELAYLLGELAYKLGEYRIAIRAYRIALKRDPNNAEAWYNLGNAYYKQGDYDEAIEYYQKALELDPNNAEAWYNLGNAYYKQGDYDEAIEYYQKALELDPNNAEAKQNLGNAKQKQGGGSGSSGSAWSHPQFEKGGGSGGGSGGSAWSHPQFEK

SEQ ID NO: 418 - protein, 243 aa, Artificial Sequence
  Synthetic
MEKKIELEEQVMHVLDQVSELAHELLHKLTGEELERAAYFNWWATEMMLELIKSDDEREIREIEEEARRILEHLEELARKGGGSGGGEEAELAYLLGELAYKLGEYRIAIRAYRIALKRDPNNAEAWYNLGNAYYKQGDYDEAIEYYQKALELDPNNAEAWYNLGNAYYKQGDYDEAIEYYQKALELDPNNAEAKQNLGNAKQKQGGGSGSSGSAWSHPQFEKGGGSGGGSGGSAWSHPQFEK

SEQ ID NO: 419 - protein, 245 aa, Artificial Sequence
  Synthetic
MEKKIELEEQVMHVLDQVSELAHELLHKLTGEELERAAYFNWWATEMMLELIKSDDEREIREIEEEARRILEHLEELARKGGGGSGGGGEEAELAYLLGELAYKLGEYRIAIRAYRIALKRDPNNAEAWYNLGNAYYKQGDYDEAIEYYQKALELDPNNAEAWYNLGNAYYKQGDYDEAIEYYQKALELDPNNAEAKQNLGNAKQKQGGGSGSSGSAWSHPQFEKGGGSGGGSGGSAWSHPQFEK

SEQ ID NO: 420 - protein, 198 aa, Artificial Sequence
  Synthetic
MEKKIELEEQVMHVLDQVSELAHELLHKLTGEELERAAYFNWWATEMMLELIKSDDEREIREIEEEARRILEHLEELARKGGSGGGSEYEIRKALEELKASTAELKRATASLRASTEELKKNPSEDALVENNRLIVEHNAIIVENNRIIAAVLELIVRAIKGGSGSSGSAWSHPQFEKGGGSGGGSGGSAWSHPQFEK

SEQ ID NO: 421 - protein, 200 aa, Artificial Sequence
  Synthetic
MEKKIELEEQVMHVLDQVSELAHELLHKLTGEELERAAYFNWWATEMMLELIKSDDEREIREIEEEARRILEHLEELARKGGGSGGGGSEYEIRKALEELKASTAELKRATASLRASTEELKKNPSEDALVENNRLIVEHNAIIVENNRIIAAVLELIVRAIKGGSGSSGSAWSHPQFEKGGGSGGGSGGSAWSHPQFEK

SEQ ID NO: 422 - protein, 202 aa, Artificial Sequence
  Synthetic
MEKKIELEEQVMHVLDQVSELAHELLHKLTGEELERAAYFNWWATEMMLELIKSDDEREIREIEEEARRILEHLEELARKGGGGSGGGGGSEYEIRKALEELKASTAELKRATASLRASTEELKKNPSEDALVENNRLIVEHNAIIVENNRIIAAVLELIVRAIKGGSGSSGSAWSHPQFEKGGGSGGGSGGSAWSHPQFEK

SEQ ID NO: 423 - protein, 155 aa, Artificial Sequence
  Synthetic
MEKKIELEEQVMHVLDQVSELAHELLHKLTGEELERAAYFNWWATEMMLELIKSDDEREIREIEEEARRILEHLEELARKGGSGGRMKQIEDKIEEILSKIYHIENEIARIKKLIGERGGSGSSGSAWSHPQFEKGGGSGGGSGGSAWSHPQFEK

SEQ ID NO: 424 - protein, 157 aa, Artificial Sequence
  Synthetic
MEKKIELEEQVMHVLDQVSELAHELLHKLTGEELERAAYFNWWATEMMLELIKSDDEREIREIEEEARRILEHLEELARKGGGSGGGRMKQIEDKIEEILSKIYHIENEIARIKKLIGERGGSGSSGSAWSHPQFEKGGGSGGGSGGSAWSHPQFEK

SEQ ID NO: 425 - protein, 159 aa, Artificial Sequence
  Synthetic
MEKKIELEEQVMHVLDQVSELAHELLHKLTGEELERAAYFNWWATEMMLELIKSDDEREIREIEEEARRILEHLEELARKGGGGSGGGGRMKQIEDKIEEILSKIYHIENEIARIKKLIGERGGSGSSGSAWSHPQFEKGGGSGGGSGGSAWSHPQFEK

SEQ ID NO: 426 - protein, 198 aa, Artificial Sequence
  Synthetic
MEKKIELEEQVMHVLDQVSELAHELLHKLTGEELERAAYFNWWATEMMLELIKSDDEREIREIEEEARRILEHLEELARKGGSGGGSEYEIRKALEELKASTAELKRSTASLRASTEELKKNPSEDALVENNRLIVENNAIIVENNRIIAAVLELIVRAIKGGSGSSGSAWSHPQFEKGGGSGGGSGGSAWSHPQFEK

SEQ ID NO: 427 - protein, 200 aa, Artificial Sequence
  Synthetic
MEKKIELEEQVMHVLDQVSELAHELLHKLTGEELERAAYFNWWATEMMLELIKSDDEREIREIEEEARRILEHLEELARKGGGSGGGGSEYEIRKALEELKASTAELKRSTASLRASTEELKKNPSEDALVENNRLIVENNAIIVENNRIIAAVLELIVRAIKGGSGSSGSAWSHPQFEKGGGSGGGSGGSAWSHPQFEK

SEQ ID NO: 428 - protein, 202 aa, Artificial Sequence
  Synthetic
MEKKIELEEQVMHVLDQVSELAHELLHKLTGEELERAAYFNWWATEMMLELIKSDDEREIREIEEEARRILEHLEELARKGGGGSGGGGGSEYEIRKALEELKASTAELKRSTASLRASTEELKKNPSEDALVENNRLIVENNAIIVENNRIIAAVLELIVRAIKGGSGSSGSAWSHPQFEKGGGSGGGSGGSAWSHPQFEK

SEQ ID NO: 429 - protein, 241 aa, Artificial Sequence
  Synthetic
MEKKIELEEQVMHVLDQVSELAHELLHKLTGEELERAAYFNWWATEMMLELIKSDDEREIREIEEEARRILEHLEELARKGGSGGNLAEKMYKAGNAMYRKGQYTIAIIAYTLALLKDPNNAEAWYNLGNAAYKKGEYDEAIEAYQKALELDPNNAEAWYNLGNAYYKQGDYDEAIEYYQKALELDPNNAEAKQNLGNAKQKQGGGSGSSGSAWSHPQFEKGGGSGGGSGGSAWSHPQFEK

SEQ ID NO: 430 - protein, 243 aa, Artificial Sequence
  Synthetic
MEKKIELEEQVMHVLDQVSELAHELLHKLTGEELERAAYFNWWATEMMLELIKSDDEREIREIEEEARRILEHLEELARKGGGSGGGNLAEKMYKAGNAMYRKGQYTIAIIAYTLALLKDPNNAEAWYNLGNAAYKKGEYDEAIEAYQKALELDPNNAEAWYNLGNAYYKQGDYDEAIEYYQKALELDPNNAEAKQNLGNAKQKQGGGSGSSGSAWSHPQFEKGGGSGGGSGGSAWSHPQFEK

SEQ ID NO: 431 - protein, 245 aa, Artificial Sequence
  Synthetic
MEKKIELEEQVMHVLDQVSELAHELLHKLTGEELERAAYFNWWATEMMLELIKSDDEREIREIEEEARRILEHLEELARKGGGGSGGGGNLAEKMYKAGNAMYRKGQYTIAIIAYTLALLKDPNNAEAWYNLGNAAYKKGEYDEAIEAYQKALELDPNNAEAWYNLGNAYYKQGDYDEAIEYYQKALELDPNNAEAKQNLGNAKQKQGGGSGSSGSAWSHPQFEKGGGSGGGSGGSAWSHPQFEK

SEQ ID NO: 432 - protein, 152 aa, Artificial Sequence
  Synthetic
MEKKIELEEQVMHVLDQVSELAHELLHKLTGEELERAAYFNWWATEMMLELIKSDDEREIREIEEEARRILEHLEELARKGGSGGGEIAKSLKEIAKSLKEIAWSLKEIAKSLKGGGSGSSGSAWSHPQFEKGGGSGGGSGGSAWSHPQFEK

SEQ ID NO: 433 - protein, 154 aa, Artificial Sequence
  Synthetic
MEKKIELEEQVMHVLDQVSELAHELLHKLTGEELERAAYFNWWATEMMLELIKSDDEREIREIEEEARRILEHLEELARKGGGSGGGGEIAKSLKEIAKSLKEIAWSLKEIAKSLKGGGSGSSGSAWSHPQFEKGGGSGGGSGGSAWSHPQFEK

SEQ ID NO: 434 - protein, 156 aa, Artificial Sequence
  Synthetic
MEKKIELEEQVMHVLDQVSELAHELLHKLTGEELERAAYFNWWATEMMLELIKSDDEREIREIEEEARRILEHLEELARKGGGGSGGGGGEIAKSLKEIAKSLKEIAWSLKEIAKSLKGGGSGSSGSAWSHPQFEKGGGSGGGSGGSAWSHPQFEK

SEQ ID NO: 435 - protein, 182 aa, Artificial Sequence
  Synthetic
MEKKIELEEQVMHVLDQVSELAHELLHKLTGEELERAAYFNWWATEMMLELIKSDDEREIREIEEEARRILEHLEELARKGGSEALEELEKALRELKKSTDELERSTEELEKNPSEDALVENNRLIVENNKIIVEVLRIIAKVLKGGSGSSGSAWSHPQFEKGGGSGGGSGGSAWSHPQFEK

SEQ ID NO: 436 - protein, 184 aa, Artificial Sequence
  Synthetic
MEKKIELEEQVMHVLDQVSELAHELLHKLTGEELERAAYFNWWATEMMLELIKSDDEREIREIEEEARRILEHLEELARKGGGSSEALEELEKALRELKKSTDELERSTEELEKNPSEDALVENNRLIVENNKIIVEVLRIIAKVLKGGSGSSGSAWSHPQFEKGGGSGGGSGGSAWSHPQFEK

SEQ ID NO: 437 - protein, 186 aa, Artificial Sequence
  Synthetic
MEKKIELEEQVMHVLDQVSELAHELLHKLTGEELERAAYFNWWATEMMLELIKSDDEREIREIEEEARRILEHLEELARKGGGGSGSEALEELEKALRELKKSTDELERSTEELEKNPSEDALVENNRLIVENNKIIVEVLRIIAKVLKGGSGSSGSAWSHPQFEKGGGSGGGSGGSAWSHPQFEK

SEQ ID NO: 438 - protein, 176 aa, Artificial Sequence
  Synthetic
MEKKIELEEQVMHVLDQVSELAHELLHKLTGEELERAAYFNWWATEMMLELIKSDDEREIREIEEEARRILEHLEELARKGGSPELEKALRELKKSTDELERSTEELEKNGSPEALVENNRLIVENNKIIVEVLRIIAKGGSGSSGSAWSHPQFEKGGGSGGGSGGSAWSHPQFEK

SEQ ID NO: 439 - protein, 178 aa, Artificial Sequence
  Synthetic
MEKKIELEEQVMHVLDQVSELAHELLHKLTGEELERAAYFNWWATEMMLELIKSDDEREIREIEEEARRILEHLEELARKGGGSSPELEKALRELKKSTDELERSTEELEKNGSPEALVENNRLIVENNKIIVEVLRIIAKGGSGSSGSAWSHPQFEKGGGSGGGSGGSAWSHPQFEK

SEQ ID NO: 440 - protein, 180 aa, Artificial Sequence
  Synthetic
MEKKIELEEQVMHVLDQVSELAHELLHKLTGEELERAAYFNWWATEMMLELIKSDDEREIREIEEEARRILEHLEELARKGGGGSGSPELEKALRELKKSTDELERSTEELEKNGSPEALVENNRLIVENNKIIVEVLRIIAKGGSGSSGSAWSHPQFEKGGGSGGGSGGSAWSHPQFEK

SEQ ID NO: 441 - protein, 169 aa, Artificial Sequence
  Synthetic
MEKKIELEEQVMHVLDQVSELAHELLHKLTGEELERAAYFNWWATEMMLELIKSDDEREIREIEEEARRILEHLEELARKGGSEKALRELKKSTDELERSTEELEKNGSPEALVENNRLIVENNKIIVEVLRGGSGSSGSAWSHPQFEKGGGSGGGSGGSAWSHPQFEK

SEQ ID NO: 442 - protein, 171 aa, Artificial Sequence
  Synthetic
MEKKIELEEQVMHVLDQVSELAHELLHKLTGEELERAAYFNWWATEMMLELIKSDDEREIREIEEEARRILEHLEELARKGGGSSEKALRELKKSTDELERSTEELEKNGSPEALVENNRLIVENNKIIVEVLRGGSGSSGSAWSHPQFEKGGGSGGGSGGSAWSHPQFEK

SEQ ID NO: 443 - protein, 173 aa, Artificial Sequence
  Synthetic
MEKKIELEEQVMHVLDQVSELAHELLHKLTGEELERAAYFNWWATEMMLELIKSDDEREIREIEEEARRILEHLEELARKGGGGSGSEKALRELKKSTDELERSTEELEKNGSPEALVENNRLIVENNKIIVEVLRGGSGSSGSAWSHPQFEKGGGSGGGSGGSAWSHPQFEK

SEQ ID NO: 444 - protein, 167 aa, Artificial Sequence
  Synthetic
MEKKISAWSHPQFEKGGGSGGGSGGSAWSHPQFEKGGSGSSGSEALEELEKALRELKKSTDELERSTEELEKNPSEDALVENNRLIVENNKIIVEVLRIIAKVLKGGGGSGDKENVLQKIYEIMKELERLGHAEASMQVSDLIYEFMKTKDENLLEEAERLLEEVKR

SEQ ID NO: 445 - protein, 171 aa, Artificial Sequence
  Synthetic
MEKKISAWSHPQFEKGGGSGGGSGGSAWSHPQFEKGGSGSSGSEALEELEKALRELKKSTDELERSTEELEKNPSEDALVENNRLIVENNKIIVEVLRIIAKVLKGGGGSGGGGSDKENVLQKIYEIMKELERLGHAEASMQVSDLIYEFMKTKDENLLEEAERLLEEVKR

SEQ ID NO: 446 - protein, 161 aa, Artificial Sequence
  Synthetic
MEKKISAWSHPQFEKGGGSGGGSGGSAWSHPQFEKGGSGSSGSPELEKALRELKKSTDELERSTEELEKNGSPEALVENNRLIVENNKIIVEVLRIIAKGGGGSGDKENVLQKIYEIMKELERLGHAEASMQVSDLIYEFMKTKDENLLEEAERLLEEVKR

SEQ ID NO: 447 - protein, 165 aa, Artificial Sequence
  Synthetic
MEKKISAWSHPQFEKGGGSGGGSGGSAWSHPQFEKGGSGSSGSPELEKALRELKKSTDELERSTEELEKNGSPEALVENNRLIVENNKIIVEVLRIIAKGGGGSGGGGSDKENVLQKIYEIMKELERLGHAEASMQVSDLIYEFMKTKDENLLEEAERLLEEVKR

SEQ ID NO: 448 - protein, 181 aa, Artificial Sequence
  Synthetic
MEKKINLDELHMQMTDLVYEALHFAKDEEFQKHVFQLFEKATKAYKNKDRQKLEKVVEELKELLERLLSGGGGSGGGSEALEELEKALRELKKSTDELERSTEELEKNPSEDALVENNRLIVENNKIIVEVLRIIAKVLKGGASPAAPAGGSAWSHPQFEKGGGSGGGSGGSAWSHPQFEK

SEQ ID NO: 449 - protein, 179 aa, Artificial Sequence
  Synthetic
MEKKINLDELHMQMTDLVYEALHFAKDEEFQKHVFQLFEKATKAYKNKDRQKLEKVVEELKELLERLLSGGGGSGSEALEELEKALRELKKSTDELERSTEELEKNPSEDALVENNRLIVENNKIIVEVLRIIAKVLKGGASPAAPAGGSAWSHPQFEKGGGSGGGSGGSAWSHPQFEK

SEQ ID NO: 450 - protein, 177 aa, Artificial Sequence
  Synthetic
MEKKINLDELHMQMTDLVYEALHFAKDEEFQKHVFQLFEKATKAYKNKDRQKLEKVVEELKELLERLLSGGGSSEALEELEKALRELKKSTDELERSTEELEKNPSEDALVENNRLIVENNKIIVEVLRIIAKVLKGGASPAAPAGGSAWSHPQFEKGGGSGGGSGGSAWSHPQFEK

SEQ ID NO: 451 - protein, 175 aa, Artificial Sequence
  Synthetic
MEKKINLDELHMQMTDLVYEALHFAKDEEFQKHVFQLFEKATKAYKNKDRQKLEKVVEELKELLERLLSGGSEALEELEKALRELKKSTDELERSTEELEKNPSEDALVENNRLIVENNKIIVEVLRIIAKVLKGGASPAAPAGGSAWSHPQFEKGGGSGGGSGGSAWSHPQFEK

SEQ ID NO: 452 - protein, 182 aa, Artificial Sequence; identical to SEQ ID NO: 435
  Synthetic

SEQ ID NO: 453 - protein, 182 aa, Artificial Sequence
  Synthetic
MEKKIELEEQVMHVLDQVSELAHELLHKLTGEELERAAYFNWWATEMMLELIKSDDEREIREIEEEAARILEHLEELARTGGSEALEELEKALRELKKSTDELERSTEELEKNPSEDALVENNRLIVENNKIIVEVLRIIAKVLKGGSGSSGSAWSHPQFEKGGGSGGGSGGSAWSHPQFEK

SEQ ID NO: 454 - protein, 127 aa, Artificial Sequence
  Synthetic
DKEWILQKIYEIMRLLDELGHAEASMRVSDLIYEFMKKGDERLLEEAERLLEEVERGGGGSGGGGSGGGGSDKEWILQKIYEIMRLLDELGHAEASMRVSDLIYEFMKKGDERLLEEAERLLEEVER

SEQ ID NO: 455 - protein, 143 aa, Artificial Sequence
  Synthetic
NDDELHMLMTDLVYEALHFAKDEEIKKRVFQLFELADKAYKNNDRQKLEKVVEELKELLERLLSGGGGSGGGGSGGGGSNDDELHMLMTDLVYEALHFAKDEEIKKRVFQLFELADKAYKNNDRQKLEKVVEELKELLERLLS

SEQ ID NO: 456 - protein, 132 aa, Artificial Sequence
  Synthetic
DKEWILQKIYEIMRLLDELGHAEASMRVSDLIYEFMKKGDERLLEEAERLLEEVERGGGGSGGGGSGGGGSGGGGSDKEWILQKIYEIMRLLDELGHAEASMRVSDLIYEFMKKGDERLLEEAERLLEEVER

SEQ ID NO: 457 - protein, 148 aa, Artificial Sequence
  Synthetic
NDDELHMLMTDLVYEALHFAKDEEIKKRVFQLFELADKAYKNNDRQKLEKVVEELKELLERLLSGGGGSGGGGSGGGGSGGGGSNDDELHMLMTDLVYEALHFAKDEEIKKRVFQLFELADKAYKNNDRQKLEKVVEELKELLERLLS

SEQ ID NO: 458 - protein, 208 aa, Artificial Sequence
  Synthetic
DKEWILQKIYEIMRLLDELGHAEASMRVSDLIYEFMKKGDERLLEEAERLLEEVERGSSGSGSSGSGSSGSGSSGSDKEWILQKIYEIMRLLDELGHAEASMRVSDLIYEFMKKGDERLLEEAERLLEEVERGSSSGGSSSGGSSSGGSSSGDKEWILQKIYEIMRLLDELGHAEASMRVSDLIYEFMKKGDERLLEEAERLLEEVER

SEQ ID NO: 459 - protein, 232 aa, Artificial Sequence
  Synthetic
NDDELHMLMTDLVYEALHFAKDEEIKKRVFQLFELADKAYKNNDRQKLEKVVEELKELLERLLSGSSGSGSSGSGSSGSGSSGSNDDELHMLMTDLVYEALHFAKDEEIKKRVFQLFELADKAYKNNDRQKLEKVVEELKELLERLLSGSSSGGSSSGGSSSGGSSSGNDDELHMLMTDLVYEALHFAKDEEIKKRVFQLFELADKAYKNNDRQKLEKVVEELKELLERLLS

SEQ ID NO: 460 - protein, 132 aa, Artificial Sequence
  Synthetic
DKEWILQKIYEIMRLLDELGHAEASMRVSDLIYEFMKKGDERLLEEAERLLEEVERGSAGGSPAGSPTSTGTSTSGDKEWILQKIYEIMRLLDELGHAEASMRVSDLIYEFMKKGDERLLEEAERLLEEVER

SEQ ID NO: 461 - protein, 208 aa, Artificial Sequence
  Synthetic
DKEWILQKIYEIMRLLDELGHAEASMRVSDLIYEFMKKGDERLLEEAERLLEEVERGSAGGSPAGSPTSTGTSGSGDKEWILQKIYEIMRLLDELGHAEASMRVSDLIYEFMKKGDERLLEEAERLLEEVERGSAGGSPAGSPTSTGTSGSGDKEWILQKIYEIMRLLDELGHAEASMRVSDLIYEFMKKGDERLLEEAERLLEEVER

SEQ ID NO: 462 - protein, 148 aa, Artificial Sequence
  Synthetic
NDDELHMLMTDLVYEALHFAKDEEIKKRVFQLFELADKAYKNNDRQKLEKVVEELKELLERLLSGSAGGSPAGSPTSTGTSGSGNDDELHMLMTDLVYEALHFAKDEEIKKRVFQLFELADKAYKNNDRQKLEKVVEELKELLERLLS

SEQ ID NO: 463 - protein, 232 aa, Artificial Sequence
  Synthetic
NDDELHMLMTDLVYEALHFAKDEEIKKRVFQLFELADKAYKNNDRQKLEKVVEELKELLERLLSGSAGGSPAGSPTSTGTSGSGNDDELHMLMTDLVYEALHFAKDEEIKKRVFQLFELADKAYKNNDRQKLEKVVEELKELLERLLSGSAGGSPAGSPTSTGTSGSGNDDELHMLMTDLVYEALHFAKDEEIKKRVFQLFELADKAYKNNDRQKLEKVVEELKELLERLLS

SEQ ID NO: 464 - protein, 218 aa, Artificial Sequence
  Synthetic
DKEWILQKIYEIMRLLDELGHAEASMRVSDLIYEFMKKGDERLLEEAERLLEEVERGGSSAGSPTSTGTSSATPSGSGTGGDKEWILQKIYEIMRLLDELGHAEASMRVSDLIYEFMKKGDERLLEEAERLLEEVERGGSSAGSPTSTGTSSATPSGSGTGGDKEWILQKIYEIMRLLDELGHAEASMRVSDLIYEFMKKGDERLLEEAERLLEEVER

SEQ ID NO: 465 - protein, 242 aa, Artificial Sequence
  Synthetic
NDDELHMLMTDLVYEALHFAKDEEIKKRVFQLFELADKAYKNNDRQKLEKVVEELKELLERLLSGGSSAGSPTSTGTSSATPSGSGTGGNDDELHMLMTDLVYEALHFAKDEEIKKRVFQLFELADKAYKNNDRQKLEKVVEELKELLERLLSGGSSAGSPTSTGTSSATPSGSGTGGNDDELHMLMTDLVYEALHFAKDEEIKKRVFQLFELADKAYKNNDRQKLEKVVEELKELLERLLS

SEQ ID NO: 466 - protein, 137 aa, Artificial Sequence
  Synthetic
DKENILQKIYEIMKTLEQLGHAEASMQVSDLIYEFMKQGDERLLEEAERLLEEVERGGSSGGGSSGGGSSGGGSSGGGSSGDKENILQKIYEIMKTLEQLGHAEASMQVSDLIYEFMKQGDERLLEEAERLLEEVER

SEQ ID NO: 467 - protein, 137 aa, Artificial Sequence
  Synthetic
DKENILQKIYEIMKTLEQLGHAEASMQVSDLIYEFMKQGDERLLEEAERLLEEVERGGSSAGSPTSTGTSSATPSGSGTGGDKENILQKIYEIMKTLEQLGHAEASMQVSDLIYEFMKQGDERLLEEAERLLEEVER

SEQ ID NO: 468 - protein, 137 aa, Artificial Sequence
  Synthetic
DKENILQKIYEIMKTLEQLGHAEASMQVSDLIYEFMKQGDERLLEEAERLLEEVERGGSSGEAAAKEAAAKEAAAKGSSGGDKENILQKIYEIMKTLEQLGHAEASMQVSDLIYEFMKQGDERLLEEAERLLEEVER

SEQ ID NO: 469 - protein, 141 aa, Artificial Sequence
  Synthetic
DKENILQKIYEIMKTLEQLGHAEASMQVSDLIYEFMKQGDERLLEEAERLLEEVERGGSSGPSTPPTPSPSTPPTPSPSPGGSSGDKENILQKIYEIMKTLEQLGHAEASMQVSDLIYEFMKQGDERLLEEAERLLEEVER

SEQ ID NO: 470 - protein, 197 aa, Artificial Sequence
  Synthetic
DKENILQKIYEIMKTLEQLGHAEASMQVSDLIYEFMKQGDERLLEEAERLLEEVERGGSSGQIFVKTLTGKTITLEVEPSDTIENVKAKIQDKEGIPPDQQRLIFAGKQLEDGRTLSDYNIQKESTLHLVLRLRGGGGSSGDKENILQKIYEIMKTLEQLGHAEASMQVSDLIYEFMKQGDERLLEEAERLLEEVER

SEQ ID NO: 471 - protein, 218 aa, Artificial Sequence
  Synthetic
DKENILQKIYEIMKTLEQLGHAEASMQVSDLIYEFMKQGDERLLEEAERLLEEVERGGSSAGSPTSTGTSSATPSGSGTGGDKENILQKIYEIMKTLEQLGHAEASMQVSDLIYEFMKQGDERLLEEAERLLEEVERGGSSAGSPTSTGTSSATPSGSGTGGDKENILQKIYEIMKTLEQLGHAEASMQVSDLIYEFMKQGDERLLEEAERLLEEVER

SEQ ID NO: 472 - protein, 218 aa, Artificial Sequence
  Synthetic
DKENILQKIYEIMKTLEQLGHAEASMQVSDLIYEFMKQGDERLLEEAERLLEEVERGGSSGEAAAKEAAAKEAAAKGSSGGDKENILQKIYEIMKTLEQLGHAEASMQVSDLIYEFMKQGDERLLEEAERLLEEVERGGSSGEAAAKEAAAKEAAAKGSSGGDKENILQKIYEIMKTLEQLGHAEASMQVSDLIYEFMKQGDERLLEEAERLLEEVER

SEQ ID NO: 473 - protein, 226 aa, Artificial Sequence
  Synthetic
DKENILQKIYEIMKTLEQLGHAEASMQVSDLIYEFMKQGDERLLEEAERLLEEVERGGSSGPSTPPTPSPSTPPTPSPSPGGSSGDKENILQKIYEIMKTLEQLGHAEASMQVSDLIYEFMKQGDERLLEEAERLLEEVERGGSSGPSTPPTPSPSTPPTPSPSPGGSSGDKENILQKIYEIMKTLEQLGHAEASMQVSDLIYEFMKQGDERLLEEAERLLEEVER

SEQ ID NO: 474 - protein, 338 aa, Artificial Sequence
  Synthetic
DKENILQKIYEIMKTLEQLGHAEASMQVSDLIYEFMKQGDERLLEEAERLLEEVERGGSSGQIFVKTLTGKTITLEVEPSDTIENVKAKIQDKEGIPPDQQRLIFAGKQLEDGRTLSDYNIQKESTLHLVLRLRGGGGSSGDKENILQKIYEIMKTLEQLGHAEASMQVSDLIYEFMKQGDERLLEEAERLLEEVERGGSSGQIFVKTLTGKTITLEVEPSDTIENVKAKIQDKEGIPPDQQRLIFAGKQLEDGRTLSDYNIQKESTLHLVLRLRGGGGSSGDKENILQKIYEIMKTLEQLGHAEASMQVSDLIYEFMKQGDERLLEEAERLLEEVER

SEQ ID NO: 475 - protein, 137 aa, Artificial Sequence
  Synthetic
DKENVLQKIYEIMKELERLGHAEASMQVSDLIYEFMKTKDENLLEEAERLLEEVKRGGSSGGGSSGGGSSGGGSSGGGSSGDKENVLQKIYEIMKELERLGHAEASMQVSDLIYEFMKTKDENLLEEAERLLEEVKR

SEQ ID NO: 476 - protein, 141 aa, Artificial Sequence
  Synthetic
DKENVLQKIYEIMKELERLGHAEASMQVSDLIYEFMKTKDENLLEEAERLLEEVKRGGSSGPSTPPTPSPSTPPTPSPSPGGSSGDKENVLQKIYEIMKELERLGHAEASMQVSDLIYEFMKTKDENLLEEAERLLEEVKR

SEQ ID NO: 477 - protein, 153 aa, Artificial Sequence
  Synthetic
NLDELHMQMTDLVYEALHFAKDEEFQKHVFQLFEKATKAYKNKDRQKLEKVVEELKELLERLLSGGSSGGGSSGGGSSGGGSSGGGSSGNLDELHMQMTDLVYEALHFAKDEEFQKHVFQLFEKATKAYKNKDRQKLEKVVEELKELLERLLS

SEQ ID NO: 478 - protein, 157 aa, Artificial Sequence
  Synthetic
NLDELHMQMTDLVYEALHFAKDEEFQKHVFQLFEKATKAYKNKDRQKLEKVVEELKELLERLLSGGSSGPSTPPTPSPSTPPTPSPSPGGSSGNLDELHMQMTDLVYEALHFAKDEEFQKHVFQLFEKATKAYKNKDRQKLEKVVEELKELLERLLS

SEQ ID NO: 479 - protein, 218 aa, Artificial Sequence
  Synthetic
DKENVLQKIYEIMKELERLGHAEASMQVSDLIYEFMKTKDENLLEEAERLLEEVKRGGSSGGGSSGGGSSGGGSSGGGSSGDKENVLQKIYEIMKELERLGHAEASMQVSDLIYEFMKTKDENLLEEAERLLEEVKRGGSSGGGSSGGGSSGGGSSGGGSSGDKENVLQKIYEIMKELERLGHAEASMQVSDLIYEFMKTKDENLLEEAERLLEEVKR

SEQ ID NO: 480 - protein, 226 aa, Artificial Sequence
  Synthetic
DKENVLQKIYEIMKELERLGHAEASMQVSDLIYEFMKTKDENLLEEAERLLEEVKRGGSSGPSTPPTPSPSTPPTPSPSPGGSSGDKENVLQKIYEIMKELERLGHAEASMQVSDLIYEFMKTKDENLLEEAERLLEEVKRGGSSGPSTPPTPSPSTPPTPSPSPGGSSGDKENVLQKIYEIMKELERLGHAEASMQVSDLIYEFMKTKDENLLEEAERLLEEVKR

SEQ ID NO: 481 - protein, 242 aa, Artificial Sequence
  Synthetic
NLDELHMQMTDLVYEALHFAKDEEFQKHVFQLFEKATKAYKNKDRQKLEKVVEELKELLERLLSGGSSGGGSSGGGSSGGGSSGGGSSGNLDELHMQMTDLVYEALHFAKDEEFQKHVFQLFEKATKAYKNKDRQKLEKVVEELKELLERLLSGGSSGGGSSGGGSSGGGSSGGGSSGNLDELHMQMTDLVYEALHFAKDEEFQKHVFQLFEKATKAYKNKDRQKLEKVVEELKELLERLLS

SEQ ID NO: 482 - protein, 250 aa, Artificial Sequence
  Synthetic
NLDELHMQMTDLVYEALHFAKDEEFQKHVFQLFEKATKAYKNKDRQKLEKVVEELKELLERLLSGGSSGPSTPPTPSPSTPPTPSPSPGGSSGNLDELHMQMTDLVYEALHFAKDEEFQKHVFQLFEKATKAYKNKDRQKLEKVVEELKELLERLLSGGSSGPSTPPTPSPSTPPTPSPSPGGSSGNLDELHMQMTDLVYEALHFAKDEEFQKHVFQLFEKATKAYKNKDRQKLEKVVEELKELLERLLS

SEQ ID NO: 483 - protein, 145 aa, Artificial Sequence
  Synthetic
DKENVLQKIYEIMKELERLGHAEASMQVSDLIYEFMKTKDENLLEEAERLLEEVKRGGSSGGGSSGGGSSGGGSSGGGSSGNLDELHMQMTDLVYEALHFAKDEEFQKHVFQLFEKATKAYKNKDRQKLEKVVEELKELLERLLS

SEQ ID NO: 484 - protein, 149 aa, Artificial Sequence
  Synthetic
DKENVLQKIYEIMKELERLGHAEASMQVSDLIYEFMKTKDENLLEEAERLLEEVKRGGSSGPSTPPTPSPSTPPTPSPSPGGSSGNLDELHMQMTDLVYEALHFAKDEEFQKHVFQLFEKATKAYKNKDRQKLEKVVEELKELLERLLS

SEQ ID NO: 485 - protein, 145 aa, Artificial Sequence
  Synthetic
NLDELHMQMTDLVYEALHFAKDEEFQKHVFQLFEKATKAYKNKDRQKLEKVVEELKELLERLLSGGSSGGGSSGGGSSGGGSSGGGSSGDKENVLQKIYEIMKELERLGHAEASMQVSDLIYEFMKTKDENLLEEAERLLEEVKR

SEQ ID NO: 486 - protein, 149 aa, Artificial Sequence
  Synthetic
NLDELHMQMTDLVYEALHFAKDEEFQKHVFQLFEKATKAYKNKDRQKLEKVVEELKELLERLLSGGSSGPSTPPTPSPSTPPTPSPSPGGSSGDKENVLQKIYEIMKELERLGHAEASMQVSDLIYEFMKTKDENLLEEAERLLEEVKR

SEQ ID NO: 487 - protein, 130 aa, Artificial Sequence
  Synthetic
NLDELHMQMTDLVYEALHFAKDEEFQKHVFQLFEKATKAYKNKDRQKLEKVVEELKELLERLLSGGGSGGGSGGDKENVLQKIYEIMKELERLGHAEASMQVSDLIYEFMKTKDENLLEEAERLLEEVKR

SEQ ID NO: 488 - protein, 130 aa, Artificial Sequence
  Synthetic
NLDELHMQMTDLVYEALHFAKDEEFQKHVFQLFEKATKAYKNKDRQKLEKVVEELKELLERLLSGGSSGGGSSGDKENVLQKIYEIMKELERLGHAEASMQVSDLIYEFMKTKDENLLEEAERLLEEVKR

SEQ ID NO: 489 - protein, 135 aa, Artificial Sequence
  Synthetic
NLDELHMQMTDLVYEALHFAKDEEFQKHVFQLFEKATKAYKNKDRQKLEKVVEELKELLERLLSGGSSGGGSSGGGSSGDKENVLQKIYEIMKELERLGHAEASMQVSDLIYEFMKTKDENLLEEAERLLEEVKR

SEQ ID NO: 490 - protein, 140 aa, Artificial Sequence
  Synthetic
NLDELHMQMTDLVYEALHFAKDEEFQKHVFQLFEKATKAYKNKDRQKLEKVVEELKELLERLLSGGSSGGGSSGGGSSGGGSSGDKENVLQKIYEIMKELERLGHAEASMQVSDLIYEFMKTKDENLLEEAERLLEEVKR

SEQ ID NO: 491 - protein, 122 aa, Artificial Sequence
  Synthetic
DKENVLQKIYEIMKELERLGHAEASMQVSDLIYEFMKTKDENLLEEAERLLEEVKRGGSSGGGSSGDKENVLQKIYEIMKELERLGHAEASMQVSDLIYEFMKTKDENLLEEAERLLEEVKR

SEQ ID NO: 492 - protein, 127 aa, Artificial Sequence
  Synthetic
DKENVLQKIYEIMKELERLGHAEASMQVSDLIYEFMKTKDENLLEEAERLLEEVKRGGSSGGGSSGGGSSGDKENVLQKIYEIMKELERLGHAEASMQVSDLIYEFMKTKDENLLEEAERLLEEVKR

SEQ ID NO: 493 - protein, 132 aa, Artificial Sequence
  Synthetic
DKENVLQKIYEIMKELERLGHAEASMQVSDLIYEFMKTKDENLLEEAERLLEEVKRGGSSGGGSSGGGSSGGGSSGDKENVLQKIYEIMKELERLGHAEASMQVSDLIYEFMKTKDENLLEEAERLLEEVKR

SEQ ID NO: 494 - protein, 141 aa, Artificial Sequence
  Synthetic
ELEEQVMHVLDQVSELAHELLHKLTGEELERAAYFNWWATEMMLELIKSDDEREIREIEEEARRILEHLEELARKGGSSGGGSSGDKENVLQKIYEIMKELERLGHAEASMQVSDLIYEFMKTKDERLLEEAERLLEEVKR

SEQ ID NO: 495 - protein, 146 aa, Artificial Sequence
  Synthetic
ELEEQVMHVLDQVSELAHELLHKLTGEELERAAYFNWWATEMMLELIKSDDEREIREIEEEARRILEHLEELARKGGSSGGGSSGGGSSGDKENVLQKIYEIMKELERLGHAEASMQVSDLIYEFMKTKDERLLEEAERLLEEVKR

SEQ ID NO: 496 - protein, 151 aa, Artificial Sequence
  Synthetic
ELEEQVMHVLDQVSELAHELLHKLTGEELERAAYFNWWATEMMLELIKSDDEREIREIEEEARRILEHLEELARKGGSSGGGSSGGGSSGGGSSGDKENVLQKIYEIMKELERLGHAEASMQVSDLIYEFMKTKDERLLEEAERLLEEVKR

SEQ ID NO: 497 - protein, 226 aa, Artificial Sequence
  Synthetic
ELEEQVMHVLDQVSELAHELLHKLTGEELERAAYFNWWATEMMLELIKSDDEREIREIEEEARRILEHLEELARKGGSSGGGSSGELEEQVMHVLDQVSELAHELLHKLTGEELERAAYFNWWATEMMLELIKSDDEREIREIEEEARRILEHLEELARKGGSSGGGSSGDKENVLQKIYEIMKELERLGHAEASMQVSDLIYEFMKTKDERLLEEAERLLEEVKR

SEQ ID NO: 498 - protein, 236 aa, Artificial Sequence
  Synthetic
ELEEQVMHVLDQVSELAHELLHKLTGEELERAAYFNWWATEMMLELIKSDDEREIREIEEEARRILEHLEELARKGGSSGGGSSGGGSSGELEEQVMHVLDQVSELAHELLHKLTGEELERAAYFNWWATEMMLELIKSDDEREIREIEEEARRILEHLEELARKGGSSGGGSSGGGSSGDKENVLQKIYEIMKELERLGHAEASMQVSDLIYEFMKTKDERLLEEAERLLEEVKR

SEQ ID NO: 499 - protein, 246 aa, Artificial Sequence
  Synthetic
ELEEQVMHVLDQVSELAHELLHKLTGEELERAAYFNWWATEMMLELIKSDDEREIREIEEEARRILEHLEELARKGGSSGGGSSGGGSSGGGSSGELEEQVMHVLDQVSELAHELLHKLTGEELERAAYFNWWATEMMLELIKSDDEREIREIEEEARRILEHLEELARKGGSSGGGSSGGGSSGGGSSGDKENVLQKIYEIMKELERLGHAEASMQVSDLIYEFMKTKDERLLEEAERLLEEVKR

SEQ ID NO: 500 - protein, 160 aa, Artificial Sequence
  Synthetic
ELEEQVMHVLDQVSELAHELLHKLTGEELERAAYFNWWATEMMLELIKSDDEREIREIEEEARRILEHLEELARKGGSSGGGSSGELEEQVMHVLDQVSELAHELLHKLTGEELERAAYFNWWATEMMLELIKSDDEREIREIEEEARRILEHLEELARK

SEQ ID NO: 501 - protein, 165 aa, Artificial Sequence
  Synthetic
ELEEQVMHVLDQVSELAHELLHKLTGEELERAAYFNWWATEMMLELIKSDDEREIREIEEEARRILEHLEELARKGGSSGGGSSGGGSSGELEEQVMHVLDQVSELAHELLHKLTGEELERAAYFNWWATEMMLELIKSDDEREIREIEEEARRILEHLEELARK

SEQ ID NO: 502 - protein, 170 aa, Artificial Sequence
  Synthetic
ELEEQVMHVLDQVSELAHELLHKLTGEELERAAYFNWWATEMMLELIKSDDEREIREIEEEARRILEHLEELARKGGSSGGGSSGGGSSGGGSSGELEEQVMHVLDQVSELAHELLHKLTGEELERAAYFNWWATEMMLELIKSDDEREIREIEEEARRILEHLEELARK

SEQ ID NO: 503 - protein, 245 aa, Artificial Sequence
  Synthetic
ELEEQVMHVLDQVSELAHELLHKLTGEELERAAYFNWWATEMMLELIKSDDEREIREIEEEARRILEHLEELARKGGSSGGGSSGELEEQVMHVLDQVSELAHELLHKLTGEELERAAYFNWWATEMMLELIKSDDEREIREIEEEARRILEHLEELARKGGSSGGGSSGELEEQVMHVLDQVSELAHELLHKLTGEELERAAYFNWWATEMMLELIKSDDEREIREIEEEARRILEHLEELARK

SEQ ID NO: 504 - protein, 255 aa, Artificial Sequence
  Synthetic
ELEEQVMHVLDQVSELAHELLHKLTGEELERAAYFNWWATEMMLELIKSDDEREIREIEEEARRILEHLEELARKGGSSGGGSSGGGSSGELEEQVMHVLDQVSELAHELLHKLTGEELERAAYFNWWATEMMLELIKSDDEREIREIEEEARRILEHLEELARKGGSSGGGSSGGGSSGELEEQVMHVLDQVSELAHELLHKLTGEELERAAYFNWWATEMMLELIKSDDEREIREIEEEARRILEHLEELARK

SEQ ID NO: 505 - protein, 265 aa, Artificial Sequence
  Synthetic
ELEEQVMHVLDQVSELAHELLHKLTGEELERAAYFNWWATEMMLELIKSDDEREIREIEEEARRILEHLEELARKGGSSGGGSSGGGSSGGGSSGELEEQVMHVLDQVSELAHELLHKLTGEELERAAYFNWWATEMMLELIKSDDEREIREIEEEARRILEHLEELARKGGSSGGGSSGGGSSGGGSSGELEEQVMHVLDQVSELAHELLHKLTGEELERAAYFNWWATEMMLELIKSDDEREIREIEEEARRILEHLEELARK

SEQ ID NO: 506 - protein, 174 aa, Artificial Sequence
  Synthetic
ELEEQVMHVLDQVSELAHELLHKLTGEELERAAYFNWWATEMMLELIKSDDEREIREIEEEARRILEHLEELARKGGASPAAPAPASPAAPAPSAPAGGELEEQVMHVLDQVSELAHELLHKLTGEELERAAYFNWWATEMMLELIKSDDEREIREIEEEARRILEHLEELARK

SEQ ID NO: 507 - protein, 144 aa, Artificial Sequence
  Synthetic
NLDELHMQMTDLVYEALHFAKDEEFQKHVFQLFEKATKAYKNKDRQKLEKVVEELKELLERLLSGGASPAAPAPASPAAPAPSAPAGGDKENVLQKIYEIMKELERLGHAEASMQVSDLIYEFMKTKDERLLEEAERLLEEVKR

SEQ ID NO: 508 - protein, 155 aa, Artificial Sequence
  Synthetic
ELEEQVMHVLDQVSELAHELLHKLTGEELERAAYFNWWATEMMLELIKSDDEREIREIEEEARRILEHLEELARKGGASPAAPAPASPAAPAPSAPAGGDKENVLQKIYEIMKELERLGHAEASMQVSDLIYEFMKTKDERLLEEAERLLEEVKR

SEQ ID NO: 509 - protein, 273 aa, Artificial Sequence
  Synthetic
ELEEQVMHVLDQVSELAHELLHKLTGEELERAAYFNWWATEMMLELIKSDDEREIREIEEEARRILEHLEELARKGGASPAAPAPASPAAPAPSAPAGGELEEQVMHVLDQVSELAHELLHKLTGEELERAAYFNWWATEMMLELIKSDDEREIREIEEEARRILEHLEELARKGGASPAAPAPASPAAPAPSAPAGGELEEQVMHVLDQVSELAHELLHKLTGEELERAAYFNWWATEMMLELIKSDDEREIREIEEEARRILEHLEELARK

SEQ ID NO: 510 - protein, 243 aa, Artificial Sequence
  Synthetic
NLDELHMQMTDLVYEALHFAKDEEFQKHVFQLFEKATKAYKNKDRQKLEKVVEELKELLERLLSGGASPAAPAPASPAAPAPSAPAGGELEEQVMHVLDQVSELAHELLHKLTGEELERAAYFNWWATEMMLELIKSDDEREIREIEEEARRILEHLEELARKGGASPAAPAPASPAAPAPSAPAGGDKENVLQKIYEIMKELERLGHAEASMQVSDLIYEFMKTKDERLLEEAERLLEEVKR

SEQ ID NO: 511 - protein, 243 aa, Artificial Sequence
  Synthetic
ELEEQVMHVLDQVSELAHELLHKLTGEELERAAYFNWWATEMMLELIKSDDEREIREIEEEARRILEHLEELARKGGASPAAPAPASPAAPAPSAPAGGNLDELHMQMTDLVYEALHFAKDEEFQKHVFQLFEKATKAYKNKDRQKLEKVVEELKELLERLLSGGASPAAPAPASPAAPAPSAPAGGDKENVLQKIYEIMKELERLGHAEASMQVSDLIYEFMKTKDERLLEEAERLLEEVKR

SEQ ID NO: 512 - protein, 216 aa, Artificial Sequence
  Synthetic
DKENVLQKIYEIMKELERLGHAEASMQVSDLIYEFMKTKDENLLEEAERLLEEVKRGGASPAAPAPASPAAPAPSAPAGGDKENVLQKIYEIMKELERLGHAEASMQVSDLIYEFMKTKDENLLEEAERLLEEVKRGGASPAAPAPASPAAPAPSAPAGGDKENVLQKIYEIMKELERLGHAEASMQVSDLIYEFMKTKDENLLEEAERLLEEVKR

SEQ ID NO: 513 - protein, 240 aa, Artificial Sequence
  Synthetic
NLDELHMQMTDLVYEALHFAKDEEFQKHVFQLFEKATKAYKNKDRQKLEKVVEELKELLERLLSGGASPAAPAPASPAAPAPSAPAGGNLDELHMQMTDLVYEALHFAKDEEFQKHVFQLFEKATKAYKNKDRQKLEKVVEELKELLERLLSGGASPAAPAPASPAAPAPSAPAGGNLDELHMQMTDLVYEALHFAKDEEFQKHVFQLFEKATKAYKNKDRQKLEKVVEELKELLERLLS

SEQ ID NO: 514 - protein, 254 aa, Artificial Sequence
  Synthetic
ELEEQVMHVLDQVSELAHELLHKLTGEELERAAYFNWWATEMMLELIKSDDEREIREIEEEARRILEHLEELARKGGASPAAPAPASPAAPAPSAPAGGELEEQVMHVLDQVSELAHELLHKLTGEELERAAYFNWWATEMMLELIKSDDEREIREIEEEARRILEHLEELARKGGASPAAPAPASPAAPAPSAPAGGDKENVLQKIYEIMKELERLGHAEASMQVSDLIYEFMKTKDENLLEEAERLLEEVKR

SEQ ID NO: 515 - protein, 166 aa, Artificial Sequence
  Synthetic
ELEEQVMHVLDQVSELAHELLHKLTGEELERAAYFNWWATEMMLELIKSDDEREIREIEEEARRILEHLEELARKGGASPAAPAPASPAGGELEEQVMHVLDQVSELAHELLHKLTGEELERAAYFNWWATEMMLELIKSDDEREIREIEEEARRILEHLEELARK

SEQ ID NO: 516 - protein, 161 aa, Artificial Sequence
  Synthetic
ELEEQVMHVLDQVSELAHELLHKLTGEELERAAYFNWWATEMMLELIKSDDEREIREIEEEARRILEHLEELARKGGASPAAPAGGELEEQVMHVLDQVSELAHELLHKLTGEELERAAYFNWWATEMMLELIKSDDEREIREIEEEARRILEHLEELARK

SEQ ID NO: 517 - protein, 136 aa, Artificial Sequence
  Synthetic
NLDELHMQMTDLVYEALHFAKDEEFQKHVFQLFEKATKAYKNKDRQKLEKVVEELKELLERLLSGGASPAAPAPASPAGGDKENVLQKIYEIMKELERLGHAEASMQVSDLIYEFMKTKDERLLEEAERLLEEVKR

SEQ ID NO: 518 - protein, 131 aa, Artificial Sequence
  Synthetic
NLDELHMQMTDLVYEALHFAKDEEFQKHVFQLFEKATKAYKNKDRQKLEKVVEELKELLERLLSGGASPAAPAGGDKENVLQKIYEIMKELERLGHAEASMQVSDLIYEFMKTKDERLLEEAERLLEEVKR

SEQ ID NO: 519 - protein, 147 aa, Artificial Sequence
  Synthetic
ELEEQVMHVLDQVSELAHELLHKLTGEELERAAYFNWWATEMMLELIKSDDEREIREIEEEARRILEHLEELARKGGASPAAPAPASPAGGDKENVLQKIYEIMKELERLGHAEASMQVSDLIYEFMKTKDERLLEEAERLLEEVKR

SEQ ID NO: 520 - protein, 142 aa, Artificial Sequence
  Synthetic
ELEEQVMHVLDQVSELAHELLHKLTGEELERAAYFNWWATEMMLELIKSDDEREIREIEEEARRILEHLEELARKGGASPAAPAGGDKENVLQKIYEIMKELERLGHAEASMQVSDLIYEFMKTKDERLLEEAERLLEEVKR

SEQ ID NO: 521 - protein, 243 aa, Artificial Sequence
  Synthetic
NIDELLMQVTDLIYEALHFAKDEEFQKHAFQLFEKATKAYKNKDKQKLEKVVEELKELLERILSGGASPAAPAPASPAAPAPSAPAGGELEEQVMHVLDQVSELAHELLHKLTGEELERAAYFNWWATEMMLELIKSDDEREIREIEEEARRILEHLEELARKGGASPAAPAPASPAAPAPSAPAGGDKENVLQKIYEIMKELERLGHAEASMQVSDLIYEFMKTKDERLLEEAERLLEEVKR

SEQ ID NO: 522 - protein, 243 aa, Artificial Sequence
  Synthetic
ELEEQVMHVLDQVSELAHELLHKLTGEELERAAYFNWWATEMMLELIKSDDEREIREIEEEARRILEHLEELARKGGASPAAPAPASPAAPAPSAPAGGNIDELLMQVTDLIYEALHFAKDEEFQKHAFQLFEKATKAYKNKDKQKLEKVVEELKELLERILSGGASPAAPAPASPAAPAPSAPAGGDKENVLQKIYEIMKELERLGHAEASMQVSDLIYEFMKTKDERLLEEAERLLEEVKR

SEQ ID NO: 523 - protein, 273 aa, Artificial Sequence
  Synthetic
ELEEQVMHVLDQVSELAHELLHKLTGEELERAAYFNWWATEMMLELIKSDDEREIREIEEEAARILEHLEELARTGGASPAAPAPASPAAPAPSAPAGGELEEQVMHVLDQVSELAHELLHKLTGEELERAAYFNWWATEMMLELIKSDDEREIREIEEEAARILEHLEELARTGGASPAAPAPASPAAPAPSAPAGGELEEQVMHVLDQVSELAHELLHKLTGEELERAAYFNWWATEMMLELIKSDDEREIREIEEEAARILEHLEELART

SEQ ID NO: 524 - protein, 216 aa, Artificial Sequence
  Synthetic
DKENVLQKIYEIMKELERLGHAEASMQVSDLIYEFMKTKDENLLEEAERLLEEVTRGGASPAAPAPASPAAPAPSAPAGGDKENVLQKIYEIMKELERLGHAEASMQVSDLIYEFMKTKDENLLEEAERLLEEVTRGGASPAAPAPASPAAPAPSAPAGGDKENVLQKIYEIMKELERLGHAEASMQVSDLIYEFMKTKDENLLEEAERLLEEVTR

SEQ ID NO: 525 - protein, 243 aa, Artificial Sequence
  Synthetic
NIDELLMQVTDLIYEALHFAKDEEFQKHAFQLFEKATKAYKNKDKQKLEKVVEELKELLERILSGGASPAAPAPASPAAPAPSAPAGGELEEQVMHVLDQVSELAHELLHKLTGEELERAAYFNWWATEMMLELIKSDDEREIREIEEEAARILEHLEELARTGGASPAAPAPASPAAPAPSAPAGGDKENVLQKIYEIMKELERLGHAEASMQVSDLIYEFMKTKDERLLEEAERLLEEVKR

SEQ ID NO: 526 - protein, 243 aa, Artificial Sequence
  Synthetic
ELEEQVMHVLDQVSELAHELLHKLTGEELERAAYFNWWATEMMLELIKSDDEREIREIEEEAARILEHLEELARTGGASPAAPAPASPAAPAPSAPAGGNIDELLMQVTDLIYEALHFAKDEEFQKHAFQLFEKATKAYKNKDKQKLEKVVEELKELLERILSGGASPAAPAPASPAAPAPSAPAGGDKENVLQKIYEIMKELERLGHAEASMQVSDLIYEFMKTKDERLLEEAERLLEEVKR

SEQ ID NO: 527 - protein, 243 aa, Artificial Sequence
  Synthetic
NIDELLMQVTDLIYEALHFAKDEEFQKHAFQLFEKATKAYKNKDKQKLEKVVEELKELLERILSGGASPAAPAPASPAAPAPSAPAGGELEEQVMHVLDQVSELAHELLHKLTGEELERAAYFNWWATEMMLELIKSDDEREIREIEEEARRILEHLEELARKGGASPAAPAPASPAAPAPSAPAGGDKENVLQKIYEIMKELERLGHAEASMQVSDLIYEFMKTKDENLLEEAERLLEEVKR

SEQ ID NO: 528 - protein, 243 aa, Artificial Sequence
  Synthetic
ELEEQVMHVLDQVSELAHELLHKLTGEELERAAYFNWWATEMMLELIKSDDEREIREIEEEARRILEHLEELARKGGASPAAPAPASPAAPAPSAPAGGNIDELLMQVTDLIYEALHFAKDEEFQKHAFQLFEKATKAYKNKDKQKLEKVVEELKELLERILSGGASPAAPAPASPAAPAPSAPAGGDKENVLQKIYEIMKELERLGHAEASMQVSDLIYEFMKTKDENLLEEAERLLEEVKR

SEQ ID NO: 529 - protein, 243 aa, Artificial Sequence
  Synthetic
NIDELLMQVTDLIYEALHFAKDEEFQKHAFQLFEKATKAYKNKDKQKLEKVVEELKELLERILSGGASPAAPAPASPAAPAPSAPAGGELEEQVMHVLDQVSELAHELLHKLTGEELERAAYFNWWATEMMLELIKSDDEREIREIEEEAARILEHLEELARTGGASPAAPAPASPAAPAPSAPAGGDKENVLQKIYEIMKELERLGHAEASMQVSDLIYEFMKTKDENLLEEAERLLEEVKR

SEQ ID NO: 530 - protein, 243 aa, Artificial Sequence
  Synthetic
ELEEQVMHVLDQVSELAHELLHKLTGEELERAAYFNWWATEMMLELIKSDDEREIREIEEEAARILEHLEELARTGGASPAAPAPASPAAPAPSAPAGGNIDELLMQVTDLIYEALHFAKDEEFQKHAFQLFEKATKAYKNKDKQKLEKVVEELKELLERILSGGASPAAPAPASPAAPAPSAPAGGDKENVLQKIYEIMKELERLGHAEASMQVSDLIYEFMKTKDENLLEEAERLLEEVKR

SEQ ID NO: 531 - protein, 243 aa, Artificial Sequence; identical to SEQ ID NO: 528
  Synthetic

SEQ ID NO: 532 - protein, 235 aa, Artificial Sequence
  Synthetic
ELEEQVMHVLDQVSELAHELLHKLTGEELERAAYFNWWATEMMLELIKSDDEREIREIEEEARRILEHLEELARKGGASPAAPAPASPAAPAPSAPAGGNIDELLMQVTDLIYEALHFAKDEEFQKHAFQLFEKATKAYKNKDKQKLEKVVEELKELLERILSGGASPAAPAPASPAGGDKENVLQKIYEIMKELERLGHAEASMQVSDLIYEFMKTKDENLLEEAERLLEEVKR

SEQ ID NO: 533 - protein, 227 aa, Artificial Sequence
  Synthetic
ELEEQVMHVLDQVSELAHELLHKLTGEELERAAYFNWWATEMMLELIKSDDEREIREIEEEARRILEHLEELARKGGASPAAPAPASPAGGNIDELLMQVTDLIYEALHFAKDEEFQKHAFQLFEKATKAYKNKDKQKLEKVVEELKELLERILSGGASPAAPAPASPAGGDKENVLQKIYEIMKELERLGHAEASMQVSDLIYEFMKTKDENLLEEAERLLEEVKR

SEQ ID NO: 534 - protein, 222 aa, Artificial Sequence
  Synthetic
ELEEQVMHVLDQVSELAHELLHKLTGEELERAAYFNWWATEMMLELIKSDDEREIREIEEEARRILEHLEELARKGGASPAAPAGGNIDELLMQVTDLIYEALHFAKDEEFQKHAFQLFEKATKAYKNKDKQKLEKVVEELKELLERILSGGASPAAPAPASPAGGDKENVLQKIYEIMKELERLGHAEASMQVSDLIYEFMKTKDENLLEEAERLLEEVKR

SEQ ID NO: 535 - protein, 230 aa, Artificial Sequence
  Synthetic
ELEEQVMHVLDQVSELAHELLHKLTGEELERAAYFNWWATEMMLELIKSDDEREIREIEEEARRILEHLEELARKGGASPAAPAPASPAAPAPSAPAGGNIDELLMQVTDLIYEALHFAKDEEFQKHAFQLFEKATKAYKNKDKQKLEKVVEELKELLERILSGGASPAAPAGGDKENVLQKIYEIMKELERLGHAEASMQVSDLIYEFMKTKDENLLEEAERLLEEVKR

SEQ ID NO: 536 - protein, 222 aa, Artificial Sequence
  Synthetic
ELEEQVMHVLDQVSELAHELLHKLTGEELERAAYFNWWATEMMLELIKSDDEREIREIEEEARRILEHLEELARKGGASPAAPAPASPAGGNIDELLMQVTDLIYEALHFAKDEEFQKHAFQLFEKATKAYKNKDKQKLEKVVEELKELLERILSGGASPAAPAGGDKENVLQKIYEIMKELERLGHAEASMQVSDLIYEFMKTKDENLLEEAERLLEEVKR

SEQ ID NO: 537 - protein, 217 aa, Artificial Sequence
  Synthetic
ELEEQVMHVLDQVSELAHELLHKLTGEELERAAYFNWWATEMMLELIKSDDEREIREIEEEARRILEHLEELARKGGASPAAPAGGNIDELLMQVTDLIYEALHFAKDEEFQKHAFQLFEKATKAYKNKDKQKLEKVVEELKELLERILSGGASPAAPAGGDKENVLQKIYEIMKELERLGHAEASMQVSDLIYEFMKTKDENLLEEAERLLEEVKR

SEQ ID NO: 538 - protein, 154 aa, Artificial Sequence
  Synthetic
ELEEQVMHVLDQVSELAHELLHKLTGEELERAAYFNWWATEMMLELIKSDDEREIREIEEEARRILEHLEELARKGGGGELEEQVMHVLDQVSELAHELLHKLTGEELERAAYFNWWATEMMLELIKSDDEREIREIEEEARRILEHLEELARK

SEQ ID NO: 539 - protein, 152 aa, Artificial Sequence
  Synthetic
ELEEQVMHVLDQVSELAHELLHKLTGEELERAAYFNWWATEMMLELIKSDDEREIREIEEEARRILEHLEELARKGGELEEQVMHVLDQVSELAHELLHKLTGEELERAAYFNWWATEMMLELIKSDDEREIREIEEEARRILEHLEELARK

SEQ ID NO: 540 - protein, 163 aa, Artificial Sequence
  Synthetic
ELEEQVMHVLDQVSELAHELLHKLTGEELERAAYFNWWATEMMLELIKSDDEREIREIEEEARRILEHLEELARKGGASPAAPAPASPAAPAPSAPAGGNIDELLMQVTDLIYEALHFAKDEEFQKHAFQLFEKATKAYKNKDKQKLEKVVEELKELLERILS

SEQ ID NO: 541 - protein, 155 aa, Artificial Sequence
  Synthetic
ELEEQVMHVLDQVSELAHELLHKLTGEELERAAYFNWWATEMMLELIKSDDEREIREIEEEARRILEHLEELARKGGASPAAPAPASPAGGNIDELLMQVTDLIYEALHFAKDEEFQKHAFQLFEKATKAYKNKDKQKLEKVVEELKELLERILS

SEQ ID NO: 542 - protein, 150 aa, Artificial Sequence
  Synthetic
ELEEQVMHVLDQVSELAHELLHKLTGEELERAAYFNWWATEMMLELIKSDDEREIREIEEEARRILEHLEELARKGGASPAAPAGGNIDELLMQVTDLIYEALHFAKDEEFQKHAFQLFEKATKAYKNKDKQKLEKVVEELKELLERILS

SEQ ID NO: 543 - protein, 235 aa, Artificial Sequence
  Synthetic
DKENVLQKIYEIMKELERLGHAEASMQVSDLIYEFMKTKDENLLEEAERLLEEVKRGGASPAAPAPASPAAPAPSAPAGGELEEQVMHVLDQVSELAHELLHKLTGEELERAAYFNWWATEMMLELIKSDDEREIREIEEEARRILEHLEELARKGGASPAAPAPASPAAPAPSAPAGGDKENVLQKIYEIMKELERLGHAEASMQVSDLIYEFMKTKDENLLEEAERLLEEVKR

SEQ ID NO: 544 - protein, 243 aa, Artificial Sequence
  Synthetic
ELEEQVMHVLDQVSELAHELLHKLTGEELERAAYFNWWATEMMLELIKSDDEREIREIEEEARRILEHLEELARKGGASPAAPAPASPAAPAPSAPAGGNLDELHMQMTDLVYEALHFAKDEEFQKHVFQLFEKATKAYKNKDRQKLEKVVEELKELLERLLSGGASPAAPAPASPAAPAPSAPAGGDKENVLQKIYEIMKELERLGHAEASMQVSDLIYEFMKTKDENLLEEAERLLEEVKR

SEQ ID NO: 545 - protein, 235 aa, Artificial Sequence
  Synthetic
ELEEQVMHVLDQVSELAHELLHKLTGEELERAAYFNWWATEMMLELIKSDDEREIREIEEEARRILEHLEELARKGGASPAAPAPASPAAPAPSAPAGGNLDELHMQMTDLVYEALHFAKDEEFQKHVFQLFEKATKAYKNKDRQKLEKVVEELKELLERLLSGGASPAAPAPASPAGGDKENVLQKIYEIMKELERLGHAEASMQVSDLIYEFMKTKDENLLEEAERLLEEVKR

SEQ ID NO: 546 - protein, 235 aa, Artificial Sequence
  Synthetic
ELEEQVMHVLDQVSELAHELLHKLTGEELERAAYFNWWATEMMLELIKSDDEREIREIEEEARRILEHLEELARKGGASPAAPAPASPAGGNLDELHMQMTDLVYEALHFAKDEEFQKHVFQLFEKATKAYKNKDRQKLEKVVEELKELLERLLSGGASPAAPAPASPAAPAPSAPAGGDKENVLQKIYEIMKELERLGHAEASMQVSDLIYEFMKTKDENLLEEAERLLEEVKR

SEQ ID NO: 547 - protein, 227 aa, Artificial Sequence
  Synthetic
ELEEQVMHVLDQVSELAHELLHKLTGEELERAAYFNWWATEMMLELIKSDDEREIREIEEEARRILEHLEELARKGGASPAAPAPASPAGGNLDELHMQMTDLVYEALHFAKDEEFQKHVFQLFEKATKAYKNKDRQKLEKVVEELKELLERLLSGGASPAAPAPASPAGGDKENVLQKIYEIMKELERLGHAEASMQVSDLIYEFMKTKDENLLEEAERLLEEVKR

SEQ ID NO: 548 - protein, 222 aa, Artificial Sequence
  Synthetic
ELEEQVMHVLDQVSELAHELLHKLTGEELERAAYFNWWATEMMLELIKSDDEREIREIEEEARRILEHLEELARKGGASPAAPAGGNLDELHMQMTDLVYEALHFAKDEEFQKHVFQLFEKATKAYKNKDRQKLEKVVEELKELLERLLSGGASPAAPAPASPAGGDKENVLQKIYEIMKELERLGHAEASMQVSDLIYEFMKTKDENLLEEAERLLEEVKR

SEQ ID NO: 549 - protein, 230 aa, Artificial Sequence
  Synthetic
ELEEQVMHVLDQVSELAHELLHKLTGEELERAAYFNWWATEMMLELIKSDDEREIREIEEEARRILEHLEELARKGGASPAAPAPASPAAPAPSAPAGGNLDELHMQMTDLVYEALHFAKDEEFQKHVFQLFEKATKAYKNKDRQKLEKVVEELKELLERLLSGGASPAAPAGGDKENVLQKIYEIMKELERLGHAEASMQVSDLIYEFMKTKDENLLEEAERLLEEVKR

SEQ ID NO: 550 - protein, 222 aa, Artificial Sequence
  Synthetic
ELEEQVMHVLDQVSELAHELLHKLTGEELERAAYFNWWATEMMLELIKSDDEREIREIEEEARRILEHLEELARKGGASPAAPAPASPAGGNLDELHMQMTDLVYEALHFAKDEEFQKHVFQLFEKATKAYKNKDRQKLEKVVEELKELLERLLSGGASPAAPAGGDKENVLQKIYEIMKELERLGHAEASMQVSDLIYEFMKTKDENLLEEAERLLEEVKR

SEQ ID NO: 551 - protein, 217 aa, Artificial Sequence
  Synthetic
ELEEQVMHVLDQVSELAHELLHKLTGEELERAAYFNWWATEMMLELIKSDDEREIREIEEEARRILEHLEELARKGGASPAAPAGGNLDELHMQMTDLVYEALHFAKDEEFQKHVFQLFEKATKAYKNKDRQKLEKVVEELKELLERLLSGGASPAAPAGGDKENVLQKIYEIMKELERLGHAEASMQVSDLIYEFMKTKDENLLEEAERLLEEVKR

SEQ ID NO: 552 - protein, 209 aa, Artificial Sequence
  Synthetic
ELEEQVMHVLDQVSELAHELLHKLTGEELERAAYFNWWATEMMLELIKSDDEREIREIEEEARRILEHLEELARKGGASAGGNLDELHMQMTDLVYEALHFAKDEEFQKHVFQLFEKATKAYKNKDRQKLEKVVEELKELLERLLSGGASAGGDKENVLQKIYEIMKELERLGHAEASMQVSDLIYEFMKTKDENLLEEAERLLEEVKR

SEQ ID NO: 553 - protein, 211 aa, Artificial Sequence
  Synthetic
ELEEQVMHVLDQVSELAHELLHKLTGEELERAAYFNWWATEMMLELIKSDDEREIREIEEEARRILEHLEELARKGGSGGSGGNLDELHMQMTDLVYEALHFAKDEEFQKHVFQLFEKATKAYKNKDRQKLEKVVEELKELLERLLSGGSGGSGGDKENVLQKIYEIMKELERLGHAEASMQVSDLIYEFMKTKDENLLEEAERLLEEVKR

SEQ ID NO: 554 - protein, 204 aa, Artificial Sequence
  Synthetic
LEEQVMHVLDQVSELAHELLHKLTGEELERAAYFNWWATEMMLELIKSDDEREIREIEEEARRILEHLEELARKGGSGGNLDELHMQMTDLVYEALHFAKDEEFQKHVFQLFEKATKAYKNKDRQKLEKVVEELKELLERLLSGGSGGDKENVLQKIYEIMKELERLGHAEASMQVSDLIYEFMKTKDENLLEEAERLLEEVKR

SEQ ID NO: 555 - protein, 217 aa, Artificial Sequence
  Synthetic
ELEEQVMHVLDQVSELAHELLHKLTGEELERAAYFNWWATEMMLELIKSDDEREIREIEEEARRILEHLEELARKGGSGGSGGSGGNLDELHMQMTDLVYEALHFAKDEEFQKHVFQLFEKATKAYKNKDRQKLEKVVEELKELLERLLSGGSGGSGGSGGDKENVLQKIYEIMKELERLGHAEASMQVSDLIYEFMKTKDENLLEEAERLLEEVKR

SEQ ID NO: 556 - protein, 247 aa, Artificial Sequence
  Synthetic
ELEEQVMHVLDQVSELAHELLHKLTGEELERAAYFNWWATEMMLELIKSDDEREIREIEEEARRILEHLEELARKGGASPAAPAGGELEEQVMHVLDQVSELAHELLHKLTGEELERAAYFNWWATEMMLELIKSDDEREIREIEEEARRILEHLEELARKGGASPAAPAGGELEEQVMHVLDQVSELAHELLHKLTGEELERAAYFNWWATEMMLELIKSDDEREIREIEEEARRILEHLEELARK

SEQ ID NO: 557 - protein, 247 aa, Artificial Sequence
  Synthetic
ELEEQVMHVLDQVSELAHELLHKLTGEELERAAYFNWWATEMMLELIKSDDEREIREIEEEARRILEHLEELARKGGSGGSGGSGGELEEQVMHVLDQVSELAHELLHKLTGEELERAAYFNWWATEMMLELIKSDDEREIREIEEEARRILEHLEELARKGGSGGSGGSGGELEEQVMHVLDQVSELAHELLHKLTGEELERAAYFNWWATEMMLELIKSDDEREIREIEEEARRILEHLEELARK

SEQ ID NO: 558 - protein, 241 aa, Artificial Sequence
  Synthetic
ELEEQVMHVLDQVSELAHELLHKLTGEELERAAYFNWWATEMMLELIKSDDEREIREIEEEARRILEHLEELARKGGSGGSGGELEEQVMHVLDQVSELAHELLHKLTGEELERAAYFNWWATEMMLELIKSDDEREIREIEEEARRILEHLEELARKGGSGGSGGELEEQVMHVLDQVSELAHELLHKLTGEELERAAYFNWWATEMMLELIKSDDEREIREIEEEARRILEHLEELARK

SEQ ID NO: 559 - protein, 235 aa, Artificial Sequence
  Synthetic
ELEEQVMHVLDQVSELAHELLHKLTGEELERAAYFNWWATEMMLELIKSDDEREIREIEEEARRILEHLEELARKGGSGGELEEQVMHVLDQVSELAHELLHKLTGEELERAAYFNWWATEMMLELIKSDDEREIREIEEEARRILEHLEELARKGGSGGELEEQVMHVLDQVSELAHELLHKLTGEELERAAYFNWWATEMMLELIKSDDEREIREIEEEARRILEHLEELARK

SEQ ID NO: 560 - protein, 225 aa, Artificial Sequence
  Synthetic
ELEEQVMHVLDQVSELAHELLHKLTGEELERAAYFNWWATEMMLELIKSDDEREIREIEEEARRILEHLEELARKGGSGGGGSGGGGSGGNLDELHMQMTDLVYEALHFAKDEEFQKHVFQLFEKATKAYKNKDRQKLEKVVEELKELLERLLSGGSGGGGSGGGGSGGDKENVLQKIYEIMKELERLGHAEASMQVSDLIYEFMKTKDENLLEEAERLLEEVKR

SEQ ID NO: 561 - protein, 219 aa, Artificial Sequence
  Synthetic
ELEEQVMHVLDQVSELAHELLHKLTGEELERAAYFNWWATEMMLELIKSDDEREIREIEEEARRILEHLEELARKGGSGGGGSGGGGNLDELHMQMTDLVYEALHFAKDEEFQKHVFQLFEKATKAYKNKDRQKLEKVVEELKELLERLLSGGSGGGGSGGGGDKENVLQKIYEIMKELERLGHAEASMQVSDLIYEFMKTKDENLLEEAERLLEEVKR

SEQ ID NO: 562 - protein, 213 aa, Artificial Sequence
  Synthetic
ELEEQVMHVLDQVSELAHELLHKLTGEELERAAYFNWWATEMMLELIKSDDEREIREIEEEARRILEHLEELARKGGGGSGGGGNLDELHMQMTDLVYEALHFAKDEEFQKHVFQLFEKATKAYKNKDRQKLEKVVEELKELLERLLSGGGGSGGGGDKENVLQKIYEIMKELERLGHAEASMQVSDLIYEFMKTKDENLLEEAERLLEEVKR

SEQ ID NO: 563 - protein, 209 aa, Artificial Sequence
  Synthetic
ELEEQVMHVLDQVSELAHELLHKLTGEELERAAYFNWWATEMMLELIKSDDEREIREIEEEARRILEHLEELARKGGGSGGGNLDELHMQMTDLVYEALHFAKDEEFQKHVFQLFEKATKAYKNKDRQKLEKVVEELKELLERLLSGGGSGGGDKENVLQKIYEIMKELERLGHAEASMQVSDLIYEFMKTKDENLLEEAERLLEEVKR

SEQ ID NO: 564 - protein, 137 aa, Artificial Sequence
  Synthetic
DKENVLQKIYEIMKELERLGHAEASMQVSDLIYEFMKTKDENLLEEAERLLEEVKRGGSGGGGSGGGGSGGGGSGGGGSGGDKENVLQKIYEIMKELERLGHAEASMQVSDLIYEFMKTKDENLLEEAERLLEEVKR

SEQ ID NO: 565 - protein, 132 aa, Artificial Sequence
  Synthetic
DKENVLQKIYEIMKELERLGHAEASMQVSDLIYEFMKTKDENLLEEAERLLEEVKRGGSGGGGSGGGGSGGGGSGGDKENVLQKIYEIMKELERLGHAEASMQVSDLIYEFMKTKDENLLEEAERLLEEVKR

SEQ ID NO: 566 - protein, 127 aa, Artificial Sequence
  Synthetic
DKENVLQKIYEIMKELERLGHAEASMQVSDLIYEFMKTKDENLLEEAERLLEEVKRGGSGGGGSGGGGSGGDKENVLQKIYEIMKELERLGHAEASMQVSDLIYEFMKTKDENLLEEAERLLEEVKR

SEQ ID NO: 567 - protein, 122 aa, Artificial Sequence
  Synthetic
DKENVLQKIYEIMKELERLGHAEASMQVSDLIYEFMKTKDENLLEEAERLLEEVKRGGSGGGGSGGDKENVLQKIYEIMKELERLGHAEASMQVSDLIYEFMKTKDENLLEEAERLLEEVKR

SEQ ID NO: 568 - protein, 141 aa, Artificial Sequence
  Synthetic
ELEEQVMHVLDQVSELAHELLHKLTGEELERAAYFNWWATEMMLELIKSDDEREIREIEEEARRILEHLEELARKGGSGGGGSGGDKENVLQKIYEIMKELERLGHAEASMQVSDLIYEFMKTKDENLLEEAERLLEEVKR

SEQ ID NO: 569 - protein, 130 aa, Artificial Sequence
  Synthetic
NLDELHMQMTDLVYEALHFAKDEEFQKHVFQLFEKATKAYKNKDRQKLEKVVEELKELLERLLSGGSGGGGSGGDKENVLQKIYEIMKELERLGHAEASMQVSDLIYEFMKTKDENLLEEAERLLEEVKR

SEQ ID NO: 570 - protein, 149 aa, Artificial Sequence
  Synthetic
ELEEQVMHVLDQVSELAHELLHKLTGEELERAAYFNWWATEMMLELIKSDDEREIREIEEEARRILEHLEELARKGGSGGGGSGGNLDELHMQMTDLVYEALHFAKDEEFQKHVFQLFEKATKAYKNKDRQKLEKVVEELKELLERLLS

SEQ ID NO: 571 - protein, 149 aa, Artificial Sequence
  Synthetic
NLDELHMQMTDLVYEALHFAKDEEFQKHVFQLFEKATKAYKNKDRQKLEKVVEELKELLERLLSGGSGGGGSGGELEEQVMHVLDQVSELAHELLHKLTGEELERAAYFNWWATEMMLELIKSDDEREIREIEEEARRILEHLEELARK

SEQ ID NO: 572 - protein, 215 aa, Artificial Sequence
  Synthetic
ELEEQVMHVLDQVSELAHELLHKLTGEELERAAYFNWWATEMMLELIKSDDEREIREIEEEARRILEHLEELARKGGSGGGGSGGNLDELHMQMTDLVYEALHFAKDEEFQKHVFQLFEKATKAYKNKDRQKLEKVVEELKELLERLLSGGSGGGGSGGDKENVLQKIYEIMKELERLGHAEASMQVSDLIYEFMKTKDENLLEEAERLLEEVKR

SEQ ID NO: 573 - protein, 215 aa, Artificial Sequence
  Synthetic
NLDELHMQMTDLVYEALHFAKDEEFQKHVFQLFEKATKAYKNKDRQKLEKVVEELKELLERLLSGGSGGGGSGGELEEQVMHVLDQVSELAHELLHKLTGEELERAAYFNWWATEMMLELIKSDDEREIREIEEEARRILEHLEELARKGGSGGGGSGGDKENVLQKIYEIMKELERLGHAEASMQVSDLIYEFMKTKDENLLEEAERLLEEVKR

SEQ ID NO: 574 - protein, 225 aa, Artificial Sequence
  Synthetic
NLDELHMQMTDLVYEALHFAKDEEFQKHVFQLFEKATKAYKNKDRQKLEKVVEELKELLERLLSGGSGGGGSGGGGSGGELEEQVMHVLDQVSELAHELLHKLTGEELERAAYFNWWATEMMLELIKSDDEREIREIEEEARRILEHLEELARKGGSGGGGSGGGGSGGDKENVLQKIYEIMKELERLGHAEASMQVSDLIYEFMKTKDENLLEEAERLLEEVKR

SEQ ID NO: 575 - protein, 132 aa, Artificial Sequence
  Synthetic
NLDELHMQMTDLVYEALHFAKDEEFQKHVFQLFEKATKAYKNKDRQKLEKVVEELKELLERLLSGGASPAAPAPGGDKENVLQKIYEIMKELERLGHAEASMQVSDLIYEFMKTKDENLLEEAERLLEEVKR

SEQ ID NO: 576 - protein, 143 aa, Artificial Sequence
  Synthetic
ELEEQVMHVLDQVSELAHELLHKLTGEELERAAYFNWWATEMMLELIKSDDEREIREIEEEARRILEHLEELARKGGASPAAPAPGGDKENVLQKIYEIMKELERLGHAEASMQVSDLIYEFMKTKDENLLEEAERLLEEVKR

SEQ ID NO: 577 - protein, 151 aa, Artificial Sequence
  Synthetic
ELEEQVMHVLDQVSELAHELLHKLTGEELERAAYFNWWATEMMLELIKSDDEREIREIEEEARRILEHLEELARKGGASPAAPAPGGNLDELHMQMTDLVYEALHFAKDEEFQKHVFQLFEKATKAYKNKDRQKLEKVVEELKELLERLLS

SEQ ID NO: 578 - protein, 151 aa, Artificial Sequence
  Synthetic
NLDELHMQMTDLVYEALHFAKDEEFQKHVFQLFEKATKAYKNKDRQKLEKVVEELKELLERLLSGGASPAAPAPGGELEEQVMHVLDQVSELAHELLHKLTGEELERAAYFNWWATEMMLELIKSDDEREIREIEEEARRILEHLEELARK

SEQ ID NO: 579 - protein, 219 aa, Artificial Sequence
  Synthetic
ELEEQVMHVLDQVSELAHELLHKLTGEELERAAYFNWWATEMMLELIKSDDEREIREIEEEARRILEHLEELARKGGASPAAPAPGGNLDELHMQMTDLVYEALHFAKDEEFQKHVFQLFEKATKAYKNKDRQKLEKVVEELKELLERLLSGGASPAAPAPGGDKENVLQKIYEIMKELERLGHAEASMQVSDLIYEFMKTKDENLLEEAERLLEEVKR

SEQ ID NO: 580 - protein, 219 aa, Artificial Sequence
  Synthetic
NLDELHMQMTDLVYEALHFAKDEEFQKHVFQLFEKATKAYKNKDRQKLEKVVEELKELLERLLSGGASPAAPAPGGELEEQVMHVLDQVSELAHELLHKLTGEELERAAYFNWWATEMMLELIKSDDEREIREIEEEARRILEHLEELARKGGASPAAPAPGGDKENVLQKIYEIMKELERLGHAEASMQVSDLIYEFMKTKDENLLEEAERLLEEVKR

SEQ ID NO: 581 - protein, 243 aa, Artificial Sequence
  Synthetic
NLDELHMQMTDLVYEALHFAKDEEFQKHVFQLFEKATKAYKNKDRQKLEKVVEELKELLERLLSGGASPAAPAPASPAAPAPSAPAGGELEEQVMHVLDQVSELAHELLHKLTGEELERAAYFNWWATEMMLELIKSDDEREIREIEEEARRILEHLEELARKGGASPAAPAPASPAAPAPSAPAGGDKENVLQKIYEIMKELERLGHAEASMQVSDLIYEFMKTKDENLLEEAERLLEEVKR

SEQ ID NO: 582 - protein, 143 aa, Artificial Sequence
  Synthetic
ELEEQVMHVLDQVSELAHELLHKLTGEELERAAYFNWWATEMMLELIKSDDEREIREIEEEAARILEHLEELARTGGASPAAPAPGGDKENVLQKIYEIMKELERLGHAEASMQVSDLIYEFMKTKDENLLEEAERLLEEVKR

SEQ ID NO: 583 - protein, 151 aa, Artificial Sequence
  Synthetic
ELEEQVMHVLDQVSELAHELLHKLTGEELERAAYFNWWATEMMLELIKSDDEREIREIEEEAARILEHLEELARTGGASPAAPAPGGNLDELHMQMTDLVYEALHFAKDEEFQKHVFQLFEKATKAYKNKDRQKLEKVVEELKELLERLLS

SEQ ID NO: 584 - protein, 151 aa, Artificial Sequence
  Synthetic
NLDELHMQMTDLVYEALHFAKDEEFQKHVFQLFEKATKAYKNKDRQKLEKVVEELKELLERLLSGGASPAAPAPGGELEEQVMHVLDQVSELAHELLHKLTGEELERAAYFNWWATEMMLELIKSDDEREIREIEEEAARILEHLEELART

SEQ ID NO: 585 - protein, 219 aa, Artificial Sequence
  Synthetic
ELEEQVMHVLDQVSELAHELLHKLTGEELERAAYFNWWATEMMLELIKSDDEREIREIEEEAARILEHLEELARTGGASPAAPAPGGNLDELHMQMTDLVYEALHFAKDEEFQKHVFQLFEKATKAYKNKDRQKLEKVVEELKELLERLLSGGASPAAPAPGGDKENVLQKIYEIMKELERLGHAEASMQVSDLIYEFMKTKDENLLEEAERLLEEVKR

SEQ ID NO: 586 - protein, 219 aa, Artificial Sequence
  Synthetic
NLDELHMQMTDLVYEALHFAKDEEFQKHVFQLFEKATKAYKNKDRQKLEKVVEELKELLERLLSGGASPAAPAPGGELEEQVMHVLDQVSELAHELLHKLTGEELERAAYFNWWATEMMLELIKSDDEREIREIEEEAARILEHLEELARTGGASPAAPAPGGDKENVLQKIYEIMKELERLGHAEASMQVSDLIYEFMKTKDENLLEEAERLLEEVKR

SEQ ID NO: 587 - protein, 243 aa, Artificial Sequence
  Synthetic
ELEEQVMHVLDQVSELAHELLHKLTGEELERAAYFNWWATEMMLELIKSDDEREIREIEEEAARILEHLEELARTGGASPAAPAPASPAAPAPSAPAGGNLDELHMQMTDLVYEALHFAKDEEFQKHVFQLFEKATKAYKNKDRQKLEKVVEELKELLERLLSGGASPAAPAPASPAAPAPSAPAGGDKENVLQKIYEIMKELERLGHAEASMQVSDLIYEFMKTKDENLLEEAERLLEEVKR

SEQ ID NO: 588 - protein, 243 aa, Artificial Sequence
  Synthetic
NLDELHMQMTDLVYEALHFAKDEEFQKHVFQLFEKATKAYKNKDRQKLEKVVEELKELLERLLSGGASPAAPAPASPAAPAPSAPAGGELEEQVMHVLDQVSELAHELLHKLTGEELERAAYFNWWATEMMLELIKSDDEREIREIEEEAARILEHLEELARTGGASPAAPAPASPAAPAPSAPAGGDKENVLQKIYEIMKELERLGHAEASMQVSDLIYEFMKTKDENLLEEAERLLEEVKR

SEQ ID NO: 589 - protein, 85 aa, Artificial Sequence
  Synthetic
SEELRAVADLQRLNIELARKLLEAVARLQELNIDLVRKTSELTDEKTIREEIRKVKEESKRIVEEAEEEIRRAKEESRKIADESR

SEQ ID NO: 590 - protein, 134 aa, Artificial Sequence
  Synthetic
EEAELAYLLGELAYKLGEYRIAIRAYRIALKRDPNNAEAWYNLGNAYYKQGDYDEAIEYYQKALELDPNNAEAWYNLGNAYYKQGDYDEAIEYYQKALELDPNNAEAWYNLGNAYYKQGDYDEAIEYYQKALEL

SEQ ID NO: 591 - protein, 83 aa, Artificial Sequence
  Synthetic
EEAELAYLLGELAYKLGEYRIAIRAYRIALKRDPNNAEAWYNLGNAYYKQGDYDEAIYYQKALELDPNNAEAKQNLGNAKQKQ

SEQ ID NO: 592 - protein, 83 aa, Artificial Sequence
  Synthetic
EEAELAYLLGELAYKLGEYRIAIRAYRIALKRDPNNAEAWYNLGNAYYKQGDYDEIEYYQKALELDPNNAEAKQNLGNAKQKQ

SEQ ID NO: 593 - protein, 116 aa, Artificial Sequence
  Synthetic
EEAELAYLLGELAYKLGEYRIAIRAYRIALKRDPNNAEAWYNLGNAYYKQGDYDEAIYYQKALELDPNNAEAWYNLGNAYYKQGDYDEAIEYYQKALELDPNNAEAKQNLGNKQKQ

SEQ ID NO: 594 - protein, 73 aa, Artificial Sequence
  Synthetic
EYEIRKALEELKASTAELKRATASLRASTEELKKNPSEDALVENNRLIVEHNAIIVENRIIAAVLELIVRAIK

SEQ ID NO: 595 - protein, 108 aa, Artificial Sequence
  Synthetic
ELEEQVMHVLDQVSELAHELLHKLTGEELERAAYFNWWATEMMLELIKSDDEREIREIEEEARRILEHLEELARKGSGSGSGYIPEAPRDGQAYVRKDGEWVLLSTFL

SEQ ID NO: 596 - protein, 211 aa, Artificial Sequence
  Synthetic
ELEEQVMHVLDQVSELAHELLHKLTGEELERAAYFNWWATEMMLELIKSDDEREIREIEEEARRILEHLEELARKGSGSGSGSGSGSGSGSGSGSGSGSGSGSELEEQVMHVLDQVSELAHELLHKLTGEELERAAYFNWWATEMMLELIKSDDEREIREIEEEARRILEHLEELARKGSGSGSGYIPEAPRDGQAYVRKDGEWVLLSTFL

SEQ ID NO: 597 - protein, 107 aa, Artificial Sequence
  Synthetic
ELEEQVMHVLDQVSELAHELLHKLTGEELERAAYFNWWATEMMLELIKSDDEREIREIEEEARRILEHLEELARKGSGSGGYIPEAPRDGQAYVRKDGEWVLLSTFL

SEQ ID NO: 598 - protein, 106 aa, Artificial Sequence
  Synthetic
ELEEQVMHVLDQVSELAHELLHKLTGEELERAAYFNWWATEMMLELIKSDDEREIREIEEEARRILEHLEELARKGSGSGYIPEAPRDGQAYVRKDGEWVLLSTFL

SEQ ID NO: 599 - protein, 105 aa, Artificial Sequence
  Synthetic
ELEEQVMHVLDQVSELAHELLHKLTGEELERAAYFNWWATEMMLELIKSDDEREIREIEEEARRILEHLEELARKGSGGYIPEAPRDGQAYVRKDGEWVLLSTFL

SEQ ID NO: 600 - protein, 208 aa, Artificial Sequence
  Synthetic
ELEEQVMHVLDQVSELAHELLHKLTGEELERAAYFNWWATEMMLELIKSDDEREIREIEEEARRILEHLEELARKGSGSGSGSGSGSGSGSGSGSGSGSGSGSELEEQVMHVLDQVSELAHELLHKLTGEELERAAYFNWWATEMMLELIKSDDEREIREIEEEARRILEHLEELARKGSGGYIPEAPRDGQAYVRKDGEWVLLSTFL

SEQ ID NO: 601 - protein, 164 aa, Artificial Sequence
  Synthetic
ELEEQVMHVLDQVSELAHELLHKLTGEELERAAYFNWWATEMMLELIKSDDEREIREIEEEARRILEHLEELARKGSGSSEELRAVADLQRLNIELARKLLEAVARLQELNIDLVRKTSELTDEKTIREEIRKVKEESKRIVEEAEEEIRRAKEESRKIADESR

SEQ ID NO: 602 - protein, 165 aa, Artificial Sequence
  Synthetic
ELEEQVMHVLDQVSELAHELLHKLTGEELERAAYFNWWATEMMLELIKSDDEREIREIEEEARRILEHLEELARKGSGSGSEELRAVADLQRLNIELARKLLEAVARLQELNIDLVRKTSELTDEKTIREEIRKVKEESKRIVEEAEEEIRRAKEESRKIADESR

SEQ ID NO: 603 - protein, 267 aa, Artificial Sequence
  Synthetic
ELEEQVMHVLDQVSELAHELLHKLTGEELERAAYFNWWATEMMLELIKSDDEREIREIEEEARRILEHLEELARKGSGSGSGSGSGSGSGSGSGSGSGSGSGSELEEQVMHVLDQVSELAHELLHKLTGEELERAAYFNWWATEMMLELIKSDDEREIREIEEEARRILEHLEELARKGSGSSEELRAVADLQRLNIELARKLLEAVARLQELNIDLVRKTSELTDEKTIREEIRKVKEESKRIVEEAEEEIRRAKEESRKIADESR

SEQ ID NO: 604 - protein, 268 aa, Artificial Sequence
  Synthetic
ELEEQVMHVLDQVSELAHELLHKLTGEELERAAYFNWWATEMMLELIKSDDEREIREIEEEARRILEHLEELARKGSGSGSGSGSGSGSGSGSGSGSGSGSGSELEEQVMHVLDQVSELAHELLHKLTGEELERAAYFNWWATEMMLELIKSDDEREIREIEEEARRILEHLEELARKGSGSGSEELRAVADLQRLNIELARKLLEAVARLQELNIDLVRKTSELTDEKTIREEIRKVKEESKRIVEEAEEEIRRAKEESRKIADESR

SEQ ID NO: 605 - protein, 97 aa, Artificial Sequence
  Synthetic
NLDELHMQMTDLVYEALHFAKDEEFQKHVFQLFEKATKAYKNKDRQKLEKVVEELKELLERLLSGSGSGSGYIPEAPRDGQAYVRKDGEWVLLSTFL

SEQ ID NO: 606 - protein, 96 aa, Artificial Sequence
  Synthetic
NLDELHMQMTDLVYEALHFAKDEEFQKHVFQLFEKATKAYKNKDRQKLEKVVEELKELLERLLSGSGSGGYIPEAPRDGQAYVRKDGEWVLLSTFL

SEQ ID NO: 607 - protein, 95 aa, Artificial Sequence
  Synthetic
NLDELHMQMTDLVYEALHFAKDEEFQKHVFQLFEKATKAYKNKDRQKLEKVVEELKELLERLLSGSGSGYIPEAPRDGQAYVRKDGEWVLLSTFL

SEQ ID NO: 608 - protein, 154 aa, Artificial Sequence
  Synthetic
NLDELHMQMTDLVYEALHFAKDEEFQKHVFQLFEKATKAYKNKDRQKLEKVVEELKELLERLLSGSGSGSEELRAVADLQRLNIELARKLLEAVARLQELNIDLVRKTSELTDEKTIREEIRKVKEESKRIVEEAEEEIRRAKEESRKIADESR

SEQ ID NO: 609 - protein, 245 aa, Artificial Sequence
  Synthetic
NLDELHMQMTDLVYEALHFAKDEEFQKHVFQLFEKATKAYKNKDRQKLEKVVEELKELLERLLSGSGSGSGSGSGSGSGSGSGSGSGSGSGSNLDELHMQMTDLVYEALHFAKDEEFQKHVFQLFEKATKAYKNKDRQKLEKVVEELKELLERLLSGSGSSEELRAVADLQRLNIELARKLLEAVARLQELNIDLVRKTSELTDEKTIREEIRKVKEESKRIVEEAEEEIRRAKEESRKIADESR

SEQ ID NO: 610 - protein, 246 aa, Artificial Sequence
  Synthetic
NLDELHMQMTDLVYEALHFAKDEEFQKHVFQLFEKATKAYKNKDRQKLEKVVEELKELLERLLSGSGSGSGSGSGSGSGSGSGSGSGSGSGSNLDELHMQMTDLVYEALHFAKDEEFQKHVFQLFEKATKAYKNKDRQKLEKVVEELKELLERLLSGSGSGSEELRAVADLQRLNIELARKLLEAVARLQELNIDLVRKTSELTDEKTIREEIRKVKEESKRIVEEAEEEIRRAKEESRKIADESR

SEQ ID NO: 611 - protein, 196 aa, Artificial Sequence
  Synthetic
EEAELAYLLGELAYKLGEYRIAIRAYRIALKRDPNNAEAWYNLGNAYYKQGDYDEAIEYYQKALELDPNNAEAWYNLGNAYYKQGDYDEAIEYYQKALELDPNNAEAWYNLGNAYYKQGDYDEAIEYYQKALELGSGSGSDKENVLQKIYEIMKELERLGHAEASMQVSDLIYEFMKTKDENLLEEAERLLEEVKR

SEQ ID NO: 612 - protein, 194 aa, Artificial Sequence
  Synthetic
EEAELAYLLGELAYKLGEYRIAIRAYRIALKRDPNNAEAWYNLGNAYYKQGDYDEAIEYYQKALELDPNNAEAWYNLGNAYYKQGDYDEAIEYYQKALELDPNNAEAWYNLGNAYYKQGDYDEAIEYYQKALELGSGSDKENVLQKIYEIMKELERLGHAEASMQVSDLIYEFMKTKDENLLEEAERLLEEVKR

SEQ ID NO: 613 - protein, 192 aa, Artificial Sequence
  Synthetic
EEAELAYLLGELAYKLGEYRIAIRAYRIALKRDPNNAEAWYNLGNAYYKQGDYDEAIEYYQKALELDPNNAEAWYNLGNAYYKQGDYDEAIEYYQKALELDPNNAEAWYNLGNAYYKQGDYDEAIEYYQKALELGSDKENVLQKIYEIMKELERLGHAEASMQVSDLIYEFMKTKDENLLEEAERLLEEVKR

SEQ ID NO: 614 - protein, 241 aa, Artificial Sequence
  Synthetic
NLDELHMQMTDLVYEALHFAKDEEFQKHVFQLFEKATKAYKNKDRQKLEKVVEELKELLERLLSGGASPAAPAPASPAAPAPSAPAGGNLDELHMQMTDLVYEALHFAKDEEFQKHVFQLFEKATKAYKNKDRQKLEKVVEELKELLERLLSGSGSSEELRAVADLQRLNIELARKLLEAVARLQELNIDLVRKTSELTDEKTIREEIRKVKEESKRIVEEAEEEIRRAKEESRKIADESR

SEQ ID NO: 615 - protein, 242 aa, Artificial Sequence
  Synthetic
NLDELHMQMTDLVYEALHFAKDEEFQKHVFQLFEKATKAYKNKDRQKLEKVVEELKELLERLLSGGASPAAPAPASPAAPAPSAPAGGNLDELHMQMTDLVYEALHFAKDEEFQKHVFQLFEKATKAYKNKDRQKLEKVVEELKELLERLLSGSGSGSEELRAVADLQRLNIELARKLLEAVARLQELNIDLVRKTSELTDEKTIREEIRKVKEESKRIVEEAEEEIRRAKEESRKIADESR

SEQ ID NO: 616 - protein, 172 aa, Artificial Sequence
  Synthetic
DKENVLQKIYEIMKELERLGHAEASMQVSDLIYEFMKTKDENLLEEAERLLEEVKRGGGSGGGSGGELEEQVMHVLDQVSELAHELLHKLTGEELERAAYFNWWATEMMLELIKSDDEREIREIEEEARRILEHLEELARKGSGSGYIPEAPRDGQAYVRKDGEWVLLSTFL

SEQ ID NO: 617 - protein, 190 aa, Artificial Sequence
  Synthetic
DKENVLQKIYEIMKELERLGHAEASMQVSDLIYEFMKTKDENLLEEAERLLEEVKRGSGSGSGSGSGSGSGSGSGSGSGSGSGSELEEQVMHVLDQVSELAHELLHKLTGEELERAAYFNWWATEMMLELIKSDDEREIREIEEEARRILEHLEELARKGSGSGYIPEAPRDGQAYVRKDGEWVLLSTFL

SEQ ID NO: 618 - protein, 180 aa, Artificial Sequence
  Synthetic
NLDELHMQMTDLVYEALHFAKDEEFQKHVFQLFEKATKAYKNKDRQKLEKVVEELKELLERLLSGGGSGGGSGGELEEQVMHVLDQVSELAHELLHKLTGEELERAAYFNWWATEMMLELIKSDDEREIREIEEEARRILEHLEELARKGSGSGYIPEAPRDGQAYVRKDGEWVLLSTFL

SEQ ID NO: 619 - protein, 186 aa, Artificial Sequence
  Synthetic
NLDELHMQMTDLVYEALHFAKDEEFQKHVFQLFEKATKAYKNKDRQKLEKVVEELKELLERLLSGSGSGSGSGSGSGSGSELEEQVMHVLDQVSELAHELLHKLTGEELERAAYFNWWATEMMLELIKSDDEREIREIEEEARRILEHLEELARKGSGSGYIPEAPRDGQAYVRKDGEWVLLSTFL

SEQ ID NO: 620 - protein, 288 aa, Artificial Sequence
  Synthetic
EEAELAYLLGELAYKLGEYRIAIRAYRIALKRDPNNAEAWYNLGNAYYKQGDYDEAIEYYQKALELDPNNAEAWYNLGNAYYKQGDYDEAIEYYQKALELDPNNAEAWYNLGNAYYKQGDYDEAIEYYQKALELGSGSGSDKENVLQKIYEIMKELERLGHAEASMQVSDLIYEFMKTKDENLLEEAERLLEEVKRGSGSGSGSGSGSGSGSGSGSGSGSGSGSNLDELHMQMTDLVYEALHFAKDEEFQKHVFQLFEKATKAYKNKDRQKLEKVVEELKELLERLLS

SEQ ID NO: 621 - protein, 269 aa, Artificial Sequence
  Synthetic
EEAELAYLLGELAYKLGEYRIAIRAYRIALKRDPNNAEAWYNLGNAYYKQGDYDEAIEYYQKALELDPNNAEAWYNLGNAYYKQGDYDEAIEYYQKALELDPNNAEAWYNLGNAYYKQGDYDEAIEYYQKALELGSGSGSDKENVLQKIYEIMKELERLGHAEASMQVSDLIYEFMKTKDENLLEEAERLLEEVKRGSGSGSGSGNLDELHMQMTDLVYEALHFAKDEEFQKHVFQLFEKATKAYKNKDRQKLEKVVEELKELLERLLS

SEQ ID NO: 622 - protein, 299 aa, Artificial Sequence
  Synthetic
EEAELAYLLGELAYKLGEYRIAIRAYRIALKRDPNNAEAWYNLGNAYYKQGDYDEAIEYYQKALELDPNNAEAWYNLGNAYYKQGDYDEAIEYYQKALELDPNNAEAWYNLGNAYYKQGDYDEAIEYYQKALELGSGSGSDKENVLQKIYEIMKELERLGHAEASMQVSDLIYEFMKTKDENLLEEAERLLEEVKRGSGSGSGSGSGSGSGSGSGSGSGSGSGSELEEQVMHVLDQVSELAHELLHKLTGEELERAAYFNWWATEMMLELIKSDDEREIREIEEEARRILEHLEELARK

SEQ ID NO: 623 - protein, 280 aa, Artificial Sequence
  Synthetic
EEAELAYLLGELAYKLGEYRIAIRAYRIALKRDPNNAEAWYNLGNAYYKQGDYDEAIEYYQKALELDPNNAEAWYNLGNAYYKQGDYDEAIEYYQKALELDPNNAEAWYNLGNAYYKQGDYDEAIEYYQKALELGSGSGSDKENVLQKIYEIMKELERLGHAEASMQVSDLIYEFMKTKDENLLEEAERLLEEVKRGSGSGSGSGELEEQVMHVLDQVSELAHELLHKLTGEELERAAYFNWWATEMMLELIKSDDEREIREIEEEARRILEHLEELARK

SEQ ID NO: 624 - protein, 161 aa, Artificial Sequence
  Synthetic
DKENVLQKIYEIMKELERLGHAEASMQVSDLIYEFMKTKDENLLEEAERLLEEVKRGGGSGGGSGGNLDELHMQMTDLVYEALHFAKDEEFQKHVFQLFEKATKAYKNKDRQKLEKVVEELKELLERLLSGSGSGYIPEAPRDGQAYVRKDGEWVLLSTFL

SEQ ID NO: 625 - protein, 179 aa, Artificial Sequence
  Synthetic
DKENVLQKIYEIMKELERLGHAEASMQVSDLIYEFMKTKDENLLEEAERLLEEVKRGSGSGSGSGSGSGSGSGSGSGSGSGSGSNLDELHMQMTDLVYEALHFAKDEEFQKHVFQLFEKATKAYKNKDRQKLEKVVEELKELLERLLSGSGSGYIPEAPRDGQAYVRKDGEWVLLSTFL

SEQ ID NO: 626 - protein, 180 aa, Artificial Sequence
  Synthetic
ELEEQVMHVLDQVSELAHELLHKLTGEELERAAYFNWWATEMMLELIKSDDEREIREIEEEARRILEHLEELARKGGGSGGGSGGNLDELHMQMTDLVYEALHFAKDEEFQKHVFQLFEKATKAYKNKDRQKLEKVVEELKELLERLLSGSGSGYIPEAPRDGQAYVRKDGEWVLLSTFL

SEQ ID NO: 627 - protein, 186 aa, Artificial Sequence
  Synthetic
ELEEQVMHVLDQVSELAHELLHKLTGEELERAAYFNWWATEMMLELIKSDDEREIREIEEEARRILEHLEELARKGSGSGSGSGSGSGSGSNLDELHMQMTDLVYEALHFAKDEEFQKHVFQLFEKATKAYKNKDRQKLEKVVEELKELLERLLSGSGSGYIPEAPRDGQAYVRKDGEWVLLSTFL

SEQ ID NO: 628 - protein, 219 aa, Artificial Sequence
  Synthetic
DKENVLQKIYEIMKELERLGHAEASMQVSDLIYEFMKTKDENLLEEAERLLEEVKRGSGSGSGSGNLDELHMQMTDLVYEALHFAKDEEFQKHVFQLFEKATKAYKNKDRQKLEKVVEELKELLERLLSGSGSGSEELRAVADLQRLNIELARKLLEAVARLQELNIDLVRKTSELTDEKTIREEIRKVKEESKRIVEEAEEEIRRAKEESRKIADESR

SEQ ID NO: 629 - protein, 238 aa, Artificial Sequence
  Synthetic
ELEEQVMHVLDQVSELAHELLHKLTGEELERAAYFNWWATEMMLELIKSDDEREIREIEEEARRILEHLEELARKGSGSGSGSGNLDELHMQMTDLVYEALHFAKDEEFQKHVFQLFEKATKAYKNKDRQKLEKVVEELKELLERLLSGSGSGSEELRAVADLQRLNIELARKLLEAVARLQELNIDLVRKTSELTDEKTIREEIRKVKEESKRIVEEAEEEIRRAKEESRKIADESR

SEQ ID NO: 630 - protein, 162 aa, Artificial Sequence
  Synthetic
ELEEQVMHVLDQVSELAHELLHKLTGEELERAAYFNWWATEMMLELIKSDDEREIREIEEEARRILEHLEELARKGSGSEEAELAYLLGELAYKLGEYRIAIRAYRIALKRDPNNAEAWYNLGNAYYKQGDYDEAIYYQKALELDPNNAEAKQNLGNAKQKQ

SEQ ID NO: 631 - protein, 164 aa, Artificial Sequence
  Synthetic
ELEEQVMHVLDQVSELAHELLHKLTGEELERAAYFNWWATEMMLELIKSDDEREIREIEEEARRILEHLEELARKGSGSGSEEAELAYLLGELAYKLGEYRIAIRAYRIALKRDPNNAEAWYNLGNAYYKQGDYDEIEYYQKALELDPNNAEAKQNLGNAKQKQ

SEQ ID NO: 632 - protein, 195 aa, Artificial Sequence
  Synthetic
ELEEQVMHVLDQVSELAHELLHKLTGEELERAAYFNWWATEMMLELIKSDDEREIREIEEEARRILEHLEELARKGSGSEEAELAYLLGELAYKLGEYRIAIRAYRIALKRDPNNAEAWYNLGNAYYKQGDYDEAIYYQKALELDPNNAEAWYNLGNAYYKQGDYDEAIEYYQKALELDPNNAEAKQNLGNKQKQ

SEQ ID NO: 633 - protein, 197 aa, Artificial Sequence
  Synthetic
ELEEQVMHVLDQVSELAHELLHKLTGEELERAAYFNWWATEMMLELIKSDDEREIREIEEEARRILEHLEELARKGSGSGSEEAELAYLLGELAYKLGEYRIAIRAYRIALKRDPNNAEAWYNLGNAYYKQGDYDEAIYYQKALELDPNNAEAWYNLGNAYYKQGDYDEAIEYYQKALELDPNNAEAKQNLGNKQKQ

SEQ ID NO: 634 - protein, 154 aa, Artificial Sequence
  Synthetic
ELEEQVMHVLDQVSELAHELLHKLTGEELERAAYFNWWATEMMLELIKSDDEREIREIEEEARRILEHLEELARKGSGSGSEYEIRKALEELKASTAELKRATASLRASTEELKKNPSEDALVENNRLIVEHNAIIVENRIIAAVLELIVRAIK

SEQ ID NO: 635 - protein, 156 aa, Artificial Sequence
  Synthetic
ELEEQVMHVLDQVSELAHELLHKLTGEELERAAYFNWWATEMMLELIKSDDEREIREIEEEARRILEHLEELARKGSGSGSGSEYEIRKALEELKASTAELKRATASLRASTEELKKNPSEDALVENNRLIVEHNAIIVENRIIAAVLELIVRAIK

SEQ ID NO: 636 - protein, 196 aa, Artificial Sequence; identical to SEQ ID NO: 611
  Synthetic

SEQ ID NO: 637 - protein, 194 aa, Artificial Sequence; identical to SEQ ID NO: 612
  Synthetic

SEQ ID NO: 638 - protein, 192 aa, Artificial Sequence; identical to SEQ ID NO: 613
  Synthetic

SEQ ID NO: 639 - protein, 168 aa, Artificial Sequence
  Synthetic
ELEEQVMHVLDQVSELAHELLHKLTGEELERAAYFNWWATEMMLELIKSDDEREIREIEEEARRILEHLEELARKGSGSGSGSEEAELAYLLGELAYKLGEYRIAIRAYRIALKRDPNNAEAWYNLGNAYYKQGDYDEAIEYYQKALELDPNNAEAKQNLGNAKQKQG

SEQ ID NO: 640 - protein, 202 aa, Artificial Sequence
  Synthetic
ELEEQVMHVLDQVSELAHELLHKLTGEELERAAYFNWWATEMMLELIKSDDEREIREIEEEARRILEHLEELARKGSGSGSGSEEAELAYLLGELAYKLGEYRIAIRAYRIALKRDPNNAEAWYNLGNAYYKQGDYDEAIEYYQKALELDPNNAEAWYNLGNAYYKQGDYDEAIEYYQKALELDPNNAEAKQNLGNAKQKQG

SEQ ID NO: 641 - protein, 159 aa, Artificial Sequence
  Synthetic
ELEEQVMHVLDQVSELAHELLHKLTGEELERAAYFNWWATEMMLELIKSDDEREIREIEEEARRILEHLEELARKGSGSGSGSGSEYEIRKALEELKASTAELKRATASLRASTEELKKNPSEDALVENNRLIVEHNAIIVENNRIIAAVLELIVRAIK

SEQ ID NO: 642 - protein, 161 aa, Artificial Sequence
  Synthetic
ELEEQVMHVLDQVSELAHELLHKLTGEELERAAYFNWWATEMMLELIKSDDEREIREIEEEARRILEHLEELARKGSGSGSGSGSGSEYEIRKALEELKASTAELKRATASLRASTEELKKNPSEDALVENNRLIVEHNAIIVENNRIIAAVLELIVRAIK

SEQ ID NO: 643 - protein, 170 aa, Artificial Sequence
  Synthetic
ELEEQVMHVLDQVSELAHELLHKLTGEELERAAYFNWWATEMMLELIKSDDEREIREIEEEARRILEHLEELARKGSGSGSGSGSEEAELAYLLGELAYKLGEYRIAIRAYRIALKRDPNNAEAWYNLGNAYYKQGDYDEAIEYYQKALELDPNNAEAKQNLGNAKQKQG

SEQ ID NO: 644 - protein, 204 aa, Artificial Sequence
  Synthetic
ELEEQVMHVLDQVSELAHELLHKLTGEELERAAYFNWWATEMMLELIKSDDEREIREIEEEARRILEHLEELARKGSGSGSGSGSEEAELAYLLGELAYKLGEYRIAIRAYRIALKRDPNNAEAWYNLGNAYYKQGDYDEAIEYYQKALELDPNNAEAWYNLGNAYYKQGDYDEAIEYYQKALELDPNNAEAKQNLGNAKQKQG

SEQ ID NO: 645 - protein, 112 aa, Artificial Sequence
  Synthetic
ELEEQVMHVLDQVSELAHELLHKLTGEELERAAYFNWWATEMMLELIKSDDEREIREIEEEARRILEHLEELARKGSGSRMKQIEDKIEEILSKIYHIENEIARIKKLIGER

SEQ ID NO: 646 - protein, 116 aa, Artificial Sequence
  Synthetic
ELEEQVMHVLDQVSELAHELLHKLTGEELERAAYFNWWATEMMLELIKSDDEREIREIEEEARRILEHLEELARKGSGSGSGSRMKQIEDKIEEILSKIYHIENEIARIKKLIGER

SEQ ID NO: 647 - protein, 155 aa, Artificial Sequence
  Synthetic
ELEEQVMHVLDQVSELAHELLHKLTGEELERAAYFNWWATEMMLELIKSDDEREIREIEEEARRILEHLEELARKGSGSGSEYEIRKALEELKASTAELKRSTASLRASTEELKKNPSEDALVENNRLIVENNAIIVENNRIIAAVLELIVRAIK

SEQ ID NO: 648 - protein, 159 aa, Artificial Sequence
  Synthetic
ELEEQVMHVLDQVSELAHELLHKLTGEELERAAYFNWWATEMMLELIKSDDEREIREIEEEARRILEHLEELARKGSGSGSGSGSEYEIRKALEELKASTAELKRSTASLRASTEELKKNPSEDALVENNRLIVENNAIIVENNRIIAAVLELIVRAIK

SEQ ID NO: 649 - protein, 200 aa, Artificial Sequence
  Synthetic
ELEEQVMHVLDQVSELAHELLHKLTGEELERAAYFNWWATEMMLELIKSDDEREIREIEEEARRILEHLEELARKGSGSGSNLAEKMYKAGNAMYRKGQYTIAIIAYTLALLKDPNNAEAWYNLGNAAYKKGEYDEAIEAYQKALELDPNNAEAWYNLGNAYYKQGDYDEAIEYYQKALELDPNNAEAKQNLGNAKQKQG

SEQ ID NO: 650 - protein, 204 aa, Artificial Sequence
  Synthetic
ELEEQVMHVLDQVSELAHELLHKLTGEELERAAYFNWWATEMMLELIKSDDEREIREIEEEARRILEHLEELARKGSGSGSGSGSNLAEKMYKAGNAMYRKGQYTIAIIAYTLALLKDPNNAEAWYNLGNAAYKKGEYDEAIEAYQKALELDPNNAEAWYNLGNAYYKQGDYDEAIEYYQKALELDPNNAEAKQNLGNAKQKQG

SEQ ID NO: 651 - protein, 111 aa, Artificial Sequence
  Synthetic
ELEEQVMHVLDQVSELAHELLHKLTGEELERAAYFNWWATEMMLELIKSDDEREIREIEEEARRILEHLEELARKGSGSGSGEIAKSLKEIAKSLKEIAWSLKEIAKSLKG

SEQ ID NO: 652 - protein, 115 aa, Artificial Sequence
  Synthetic
ELEEQVMHVLDQVSELAHELLHKLTGEELERAAYFNWWATEMMLELIKSDDEREIREIEEEARRILEHLEELARKGSGSGSGSGSGEIAKSLKEIAKSLKEIAWSLKEIAKSLKG

SEQ ID NO: 653 - protein, 165 aa, Artificial Sequence
  Synthetic
ELEEQVMHVLDQVSELAHELLHKLTGEELERAAYFNWWATEMMLELIKSDDEREIREIEEEARRILEHLEELARKGGSGGEEAELAYLLGELAYKLGEYRIAIRAYRIALKRDPNNAEAWYNLGNAYYKQGDYDEAIEYYQKALELDPNNAEAKQNLGNAKQKQG

SEQ ID NO: 654 - protein, 167 aa, Artificial Sequence
  Synthetic
ELEEQVMHVLDQVSELAHELLHKLTGEELERAAYFNWWATEMMLELIKSDDEREIREIEEEARRILEHLEELARKGGGSGGGEEAELAYLLGELAYKLGEYRIAIRAYRIALKRDPNNAEAWYNLGNAYYKQGDYDEAIEYYQKALELDPNNAEAKQNLGNAKQKQG

SEQ ID NO: 655 - protein, 169 aa, Artificial Sequence
  Synthetic
ELEEQVMHVLDQVSELAHELLHKLTGEELERAAYFNWWATEMMLELIKSDDEREIREIEEEARRILEHLEELARKGGGGSGGGGEEAELAYLLGELAYKLGEYRIAIRAYRIALKRDPNNAEAWYNLGNAYYKQGDYDEAIEYYQKALELDPNNAEAKQNLGNAKQKQG

SEQ ID NO: 656 - protein, 199 aa, Artificial Sequence
  Synthetic
ELEEQVMHVLDQVSELAHELLHKLTGEELERAAYFNWWATEMMLELIKSDDEREIREIEEEARRILEHLEELARKGGSGGEEAELAYLLGELAYKLGEYRIAIRAYRIALKRDPNNAEAWYNLGNAYYKQGDYDEAIEYYQKALELDPNNAEAWYNLGNAYYKQGDYDEAIEYYQKALELDPNNAEAKQNLGNAKQKQG

SEQ ID NO: 657 - protein, 201 aa, Artificial Sequence
  Synthetic
ELEEQVMHVLDQVSELAHELLHKLTGEELERAAYFNWWATEMMLELIKSDDEREIREIEEEARRILEHLEELARKGGGSGGGEEAELAYLLGELAYKLGEYRIAIRAYRIALKRDPNNAEAWYNLGNAYYKQGDYDEAIEYYQKALELDPNNAEAWYNLGNAYYKQGDYDEAIEYYQKALELDPNNAEAKQNLGNAKQKQG

SEQ ID NO: 658 - protein, 203 aa, Artificial Sequence
  Synthetic
ELEEQVMHVLDQVSELAHELLHKLTGEELERAAYFNWWATEMMLELIKSDDEREIREIEEEARRILEHLEELARKGGGGSGGGGEEAELAYLLGELAYKLGEYRIAIRAYRIALKRDPNNAEAWYNLGNAYYKQGDYDEAIEYYQKALELDPNNAEAWYNLGNAYYKQGDYDEAIEYYQKALELDPNNAEAKQNLGNAKQKQG

SEQ ID NO: 659 - protein, 156 aa, Artificial Sequence
  Synthetic
ELEEQVMHVLDQVSELAHELLHKLTGEELERAAYFNWWATEMMLELIKSDDEREIREIEEEARRILEHLEELARKGGSGGGSEYEIRKALEELKASTAELKRATASLRASTEELKKNPSEDALVENNRLIVEHNAIIVENNRIIAAVLELIVRAIK

SEQ ID NO: 660 - protein, 158 aa, Artificial Sequence
  Synthetic
ELEEQVMHVLDQVSELAHELLHKLTGEELERAAYFNWWATEMMLELIKSDDEREIREIEEEARRILEHLEELARKGGGSGGGGSEYEIRKALEELKASTAELKRATASLRASTEELKKNPSEDALVENNRLIVEHNAIIVENNRIIAAVLELIVRAIK

SEQ ID NO: 661 - protein, 160 aa, Artificial Sequence
  Synthetic
ELEEQVMHVLDQVSELAHELLHKLTGEELERAAYFNWWATEMMLELIKSDDEREIREIEEEARRILEHLEELARKGGGGSGGGGGSEYEIRKALEELKASTAELKRATASLRASTEELKKNPSEDALVENNRLIVEHNAIIVENNRIIAAVLELIVRAIK

SEQ ID NO: 662 - protein, 113 aa, Artificial Sequence
  Synthetic
ELEEQVMHVLDQVSELAHELLHKLTGEELERAAYFNWWATEMMLELIKSDDEREIREIEEEARRILEHLEELARKGGSGGRMKQIEDKIEEILSKIYHIENEIARIKKLIGER

SEQ ID NO: 663 - protein, 115 aa, Artificial Sequence
  Synthetic
ELEEQVMHVLDQVSELAHELLHKLTGEELERAAYFNWWATEMMLELIKSDDEREIREIEEEARRILEHLEELARKGGGSGGGRMKQIEDKIEEILSKIYHIENEIARIKKLIGER

SEQ ID NO: 664 - protein, 117 aa, Artificial Sequence
  Synthetic
ELEEQVMHVLDQVSELAHELLHKLTGEELERAAYFNWWATEMMLELIKSDDEREIREIEEEARRILEHLEELARKGGGGSGGGGRMKQIEDKIEEILSKIYHIENEIARIKKLIGER

SEQ ID NO: 665 - protein, 156 aa, Artificial Sequence
  Synthetic
ELEEQVMHVLDQVSELAHELLHKLTGEELERAAYFNWWATEMMLELIKSDDEREIREIEEEARRILEHLEELARKGGSGGGSEYEIRKALEELKASTAELKRSTASLRASTEELKKNPSEDALVENNRLIVENNAIIVENNRIIAAVLELIVRAIK

SEQ ID NO: 666 - protein, 158 aa, Artificial Sequence
  Synthetic
ELEEQVMHVLDQVSELAHELLHKLTGEELERAAYFNWWATEMMLELIKSDDEREIREIEEEARRILEHLEELARKGGGSGGGGSEYEIRKALEELKASTAELKRSTASLRASTEELKKNPSEDALVENNRLIVENNAIIVENNRIIAAVLELIVRAIK

SEQ ID NO: 667 - protein, 160 aa, Artificial Sequence
  Synthetic
ELEEQVMHVLDQVSELAHELLHKLTGEELERAAYFNWWATEMMLELIKSDDEREIREIEEEARRILEHLEELARKGGGGSGGGGGSEYEIRKALEELKASTAELKRSTASLRASTEELKKNPSEDALVENNRLIVENNAIIVENNRIIAAVLELIVRAIK

SEQ ID NO: 668 - protein, 199 aa, Artificial Sequence
  Synthetic
ELEEQVMHVLDQVSELAHELLHKLTGEELERAAYFNWWATEMMLELIKSDDEREIREIEEEARRILEHLEELARKGGSGGNLAEKMYKAGNAMYRKGQYTIAIIAYTLALLKDPNNAEAWYNLGNAAYKKGEYDEAIEAYQKALELDPNNAEAWYNLGNAYYKQGDYDEAIEYYQKALELDPNNAEAKQNLGNAKQKQG

SEQ ID NO: 669 - protein, 201 aa, Artificial Sequence
  Synthetic
ELEEQVMHVLDQVSELAHELLHKLTGEELERAAYFNWWATEMMLELIKSDDEREIREIEEEARRILEHLEELARKGGGSGGGNLAEKMYKAGNAMYRKGQYTIAIIAYTLALLKDPNNAEAWYNLGNAAYKKGEYDEAIEAYQKALELDPNNAEAWYNLGNAYYKQGDYDEAIEYYQKALELDPNNAEAKQNLGNAKQKQG

SEQ ID NO: 670 - protein, 203 aa, Artificial Sequence
  Synthetic
ELEEQVMHVLDQVSELAHELLHKLTGEELERAAYFNWWATEMMLELIKSDDEREIREIEEEARRILEHLEELARKGGGGSGGGGNLAEKMYKAGNAMYRKGQYTIAIIAYTLALLKDPNNAEAWYNLGNAAYKKGEYDEAIEAYQKALELDPNNAEAWYNLGNAYYKQGDYDEAIEYYQKALELDPNNAEAKQNLGNAKQKQG

SEQ ID NO: 671 - protein, 110 aa, Artificial Sequence
  Synthetic
ELEEQVMHVLDQVSELAHELLHKLTGEELERAAYFNWWATEMMLELIKSDDEREIREIEEEARRILEHLEELARKGGSGGGEIAKSLKEIAKSLKEIAWSLKEIAKSLKG

SEQ ID NO: 672 - protein, 112 aa, Artificial Sequence
  Synthetic
ELEEQVMHVLDQVSELAHELLHKLTGEELERAAYFNWWATEMMLELIKSDDEREIREIEEEARRILEHLEELARKGGGSGGGGEIAKSLKEIAKSLKEIAWSLKEIAKSLKG

SEQ ID NO: 673 - protein, 114 aa, Artificial Sequence
  Synthetic
ELEEQVMHVLDQVSELAHELLHKLTGEELERAAYFNWWATEMMLELIKSDDEREIREIEEEARRILEHLEELARKGGGGSGGGGGEIAKSLKEIAKSLKEIAWSLKEIAKSLKG

SEQ ID NO: 674 - protein, 140 aa, Artificial Sequence
  Synthetic
ELEEQVMHVLDQVSELAHELLHKLTGEELERAAYFNWWATEMMLELIKSDDEREIREIEEEARRILEHLEELARKGGSEALEELEKALRELKKSTDELERSTEELEKNPSEDALVENNRLIVENNKIIVEVLRIIAKVLK

SEQ ID NO: 675 - protein, 142 aa, Artificial Sequence
  Synthetic
ELEEQVMHVLDQVSELAHELLHKLTGEELERAAYFNWWATEMMLELIKSDDEREIREIEEEARRILEHLEELARKGGGSSEALEELEKALRELKKSTDELERSTEELEKNPSEDALVENNRLIVENNKIIVEVLRIIAKVLK

SEQ ID NO: 676 - protein, 144 aa, Artificial Sequence
  Synthetic
ELEEQVMHVLDQVSELAHELLHKLTGEELERAAYFNWWATEMMLELIKSDDEREIREIEEEARRILEHLEELARKGGGGSGSEALEELEKALRELKKSTDELERSTEELEKNPSEDALVENNRLIVENNKIIVEVLRIIAKVLK

SEQ ID NO: 677 - protein, 134 aa, Artificial Sequence
  Synthetic
ELEEQVMHVLDQVSELAHELLHKLTGEELERAAYFNWWATEMMLELIKSDDEREIREIEEEARRILEHLEELARKGGSPELEKALRELKKSTDELERSTEELEKNGSPEALVENNRLIVENNKIIVEVLRIIAK

SEQ ID NO: 678 - protein, 136 aa, Artificial Sequence
  Synthetic
ELEEQVMHVLDQVSELAHELLHKLTGEELERAAYFNWWATEMMLELIKSDDEREIREIEEEARRILEHLEELARKGGGSSPELEKALRELKKSTDELERSTEELEKNGSPEALVENNRLIVENNKIIVEVLRIIAK

SEQ ID NO: 679 - protein, 138 aa, Artificial Sequence
  Synthetic
ELEEQVMHVLDQVSELAHELLHKLTGEELERAAYFNWWATEMMLELIKSDDEREIREIEEEARRILEHLEELARKGGGGSGSPELEKALRELKKSTDELERSTEELEKNGSPEALVENNRLIVENNKIIVEVLRIIAK

SEQ ID NO: 680 - protein, 127 aa, Artificial Sequence
  Synthetic
ELEEQVMHVLDQVSELAHELLHKLTGEELERAAYFNWWATEMMLELIKSDDEREIREIEEEARRILEHLEELARKGGSEKALRELKKSTDELERSTEELEKNGSPEALVENNRLIVENNKIIVEVLR

SEQ ID NO: 681 - protein, 129 aa, Artificial Sequence
  Synthetic
ELEEQVMHVLDQVSELAHELLHKLTGEELERAAYFNWWATEMMLELIKSDDEREIREIEEEARRILEHLEELARKGGGSSEKALRELKKSTDELERSTEELEKNGSPEALVENNRLIVENNKIIVEVLR

SEQ ID NO: 682 - protein, 131 aa, Artificial Sequence
  Synthetic
ELEEQVMHVLDQVSELAHELLHKLTGEELERAAYFNWWATEMMLELIKSDDEREIREIEEEARRILEHLEELARKGGGGSGSEKALRELKKSTDELERSTEELEKNGSPEALVENNRLIVENNKIIVEVLR

SEQ ID NO: 683 - protein, 125 aa, Artificial Sequence
  Synthetic
SEALEELEKALRELKKSTDELERSTEELEKNPSEDALVENNRLIVENNKIIVEVLRIIAKVLKGGGGSGDKENVLQKIYEIMKELERLGHAEASMQVSDLIYEFMKTKDENLLEEAERLLEEVKR

SEQ ID NO: 684 - protein, 129 aa, Artificial Sequence
  Synthetic
SEALEELEKALRELKKSTDELERSTEELEKNPSEDALVENNRLIVENNKIIVEVLRIIAKVLKGGGGSGGGGSDKENVLQKIYEIMKELERLGHAEASMQVSDLIYEFMKTKDENLLEEAERLLEEVKR

SEQ ID NO: 685 - protein, 119 aa, Artificial Sequence
  Synthetic
SPELEKALRELKKSTDELERSTEELEKNGSPEALVENNRLIVENNKIIVEVLRIIAKGGGGSGDKENVLQKIYEIMKELERLGHAEASMQVSDLIYEFMKTKDENLLEEAERLLEEVKR

SEQ ID NO: 686 - protein, 123 aa, Artificial Sequence
  Synthetic
SPELEKALRELKKSTDELERSTEELEKNGSPEALVENNRLIVENNKIIVEVLRIIAKGGGGSGGGGSDKENVLQKIYEIMKELERLGHAEASMQVSDLIYEFMKTKDENLLEEAERLLEEVKR

SEQ ID NO: 687 - protein, 135 aa, Artificial Sequence
  Synthetic
NLDELHMQMTDLVYEALHFAKDEEFQKHVFQLFEKATKAYKNKDRQKLEKVVEELKELLERLLSGGGGSGGGSEALEELEKALRELKKSTDELERSTEELEKNPSEDALVENNRLIVENNKIIVEVLRIIAKVLK

SEQ ID NO: 688 - protein, 133 aa, Artificial Sequence
  Synthetic
NLDELHMQMTDLVYEALHFAKDEEFQKHVFQLFEKATKAYKNKDRQKLEKVVEELKELLERLLSGGGGSGSEALEELEKALRELKKSTDELERSTEELEKNPSEDALVENNRLIVENNKIIVEVLRIIAKVLK

SEQ ID NO: 689 - protein, 131 aa, Artificial Sequence
  Synthetic
NLDELHMQMTDLVYEALHFAKDEEFQKHVFQLFEKATKAYKNKDRQKLEKVVEELKELLERLLSGGGSSEALEELEKALRELKKSTDELERSTEELEKNPSEDALVENNRLIVENNKIIVEVLRIIAKVLK

SEQ ID NO: 690 - protein, 129 aa, Artificial Sequence
  Synthetic
NLDELHMQMTDLVYEALHFAKDEEFQKHVFQLFEKATKAYKNKDRQKLEKVVEELKELLERLLSGGSEALEELEKALRELKKSTDELERSTEELEKNPSEDALVENNRLIVENNKIIVEVLRIIAKVLK

SEQ ID NO: 691 - protein, 140 aa, Artificial Sequence; identical to SEQ ID NO: 674
  Synthetic

SEQ ID NO: 692 - protein, 140 aa, Artificial Sequence
  Synthetic
ELEEQVMHVLDQVSELAHELLHKLTGEELERAAYFNWWATEMMLELIKSDDEREIREIEEEAARILEHLEELARTGGSEALEELEKALRELKKSTDELERSTEELEKNPSEDALVENNRLIVENNKIIVEVLRIIAKVLK

SEQ ID NO: 693 - protein, 141 aa, Artificial Sequence
  Synthetic
MELEEQVMHVLDQVSELAHELLHKLTGEELERAAYFNWWATEMMLELIKSDDEREIREIEEEARRILEHLEELARKGGSEALEELEKALRELKKSTDELERSTEELEKNPSEDALVENNRLIVENNKIIVEVLRIIAKVLK

SEQ ID NO: 694 - protein, 220 aa, Artificial Sequence
  Synthetic
MELEEQVMHVLDQVSELAHELLHKLTGEELERAAYFNWWATEMMLELIKSDDEREIREIEEEAARILEHLEELARTGGASPAAPAPGGNLDELHMQMTDLVYEALHFAKDEEFQKHVFQLFEKATKAYKNKDRQKLEKVVEELKELLERLLSGGASPAAPAPGGDKENVLQKIYEIMKELERLGHAEASMQVSDLIYEFMKTKDENLLEEAERLLEEVKR

SEQ ID NO: 695 - protein, 244 aa, Artificial Sequence
  Synthetic
MELEEQVMHVLDQVSELAHELLHKLTGEELERAAYFNWWATEMMLELIKSDDEREIREIEEEAARILEHLEELARTGGASPAAPAPASPAAPAPSAPAGGNLDELHMQMTDLVYEALHFAKDEEFQKHVFQLFEKATKAYKNKDRQKLEKVVEELKELLERLLSGGASPAAPAPASPAAPAPSAPAGGDKENVLQKIYEIMKELERLGHAEASMQVSDLIYEFMKTKDENLLEEAERLLEEVKR

SEQ ID NO: 696 - protein, 143 aa, Artificial Sequence
  Synthetic
MELEEQVMHVLDQVSELAHELLHKLTGEELERAAYFNWWATEMMLELIKSDDEREIREIEEEARRILEHLEELARKGGGSSEALEELEKALRELKKSTDELERSTEELEKNPSEDALVENNRLIVENNKIIVEVLRIIAKVLK

SEQ ID NO: 697 - protein, 216 aa, Artificial Sequence
  Synthetic
MELEEQVMHVLDQVSELAHELLHKLTGEELERAAYFNWWATEMMLELIKSDDEREIREIEEEARRILEHLEELARKGGGSGGGSGGNLDELHMQMTDLVYEALHFAKDEEFQKHVFQLFEKATKAYKNKDRQKLEKVVEELKELLERLLSGGGSGGGSGGDKENVLQKIYEIMKELERLGHAEASMQVSDLIYEFMKTKDENLLEEAERLLEEVKR

SEQ ID NO: 698 - protein, 107 aa, Artificial Sequence
  Synthetic
MELEEQVMHVLDQVSELAHELLHKLTGEELERAAYFNWWATEMMLELIKSDDEREIREIEEEARRILEHLEELARKGSGSGYIPEAPRDGQAYVRKDGEWVLLSTFL

SEQ ID NO: 699 - protein, 235 aa, Artificial Sequence
  Synthetic
  MISC_FEATURE (1)..(20): optionally absent
MSHHHHHHHHSENLYFQSGGELEEQVMHVLDQVSELAHELLHKLTGEELERAAYFNWWATEMMLELIKSDDEREIREIEEEARRILEHLEELARKGGGSGGGSGGNIDELLMQVTDLIYEALHFAKDEEFQKHAFQLFEKATKAYKNKDKQKLEKVVEELKELLERILSGGGSGGGSGGDKENVLQKIYEIMKELERLGHAEASMQVSDLIYEFMKTKDENLLEEAERLLEEVKR

SEQ ID NO: 700 - protein, 77 aa, Artificial Sequence
  Synthetic
  MISC_FEATURE (1)..(21): optionally absent
MSHHHHHHHHSENLYFQSGGGDKENILQKIYEIMKTLEQLGHAEASMQVSDLIYEFMKQGDERLLEEAERLLEEVER

SEQ ID NO: 701 - protein, 303 aa, Artificial Sequence
  Synthetic
DKENILQKIYEIMKTLDQLGHAEASMQVSDLIYEFMKQGDERLLEEAERLLEEVERGGSGSGGSGSGSGGSEPKSSDKTHTCPPCPAPELLGGPSVFLFPPKPKDTLMISRTPEVTCVVVDVSHEDPEVKFNWYVDGVEVHNAKTKPREEQYNSTYRVVSVLTVLHQDWLNGKEYKCKVSNKALPAPIEKTISKAKGQPREPQVYTLPPSRDELTKNQVSLTCLVKGFYPSDIAVEWESNGQPENNYKTTPPVLDSDGSFFLYSKLTVDKSRWQQGNVFSCSVMHEALHNHYTQKSLSLSPGK
